(19) United States
(12) Patent Application Publication
(10) Pub. No.: US 2005/0059001 A1
(43) Pub. Date: Mar. 17, 2005

(54) Nucleic acids isolated in neuroblastoma

(76) Inventor: Akira Nakagawara, Chiba (JP)

Correspondence Address: FITCH EVEN TABIN AND FLANNERY, 120 SOUTH LA SALLE STREET, SUITE 1600, CHICAGO, IL, 60603-3406, US

(21) Appl. No.: 10/479,081

(22) PCT Filed: May 30, 2002
(86) PCT No.: PCT/JP02/05295

(30) Foreign Application Priority Data
May 31, 2001 (JP) 2001-163666
Aug. 24, 2001 (JP) 2001-255260

(51) Int. Cl. C12Q 1/68; C07H 21/04; C12N 9/64

(52) U.S. Cl. 435/6; 435/69.1; 435/320.1; 435/226; 435/325; 536/23.2

(57) ABSTRACT

There are disclosed a nucleic acid whose expression is enhanced in human neuroblastoma with favorable prognosis based on comparison between human neuroblastoma with favorable prognosis and human neuroblastoma with unfavorable prognosis, the nucleic acid comprising any one of base sequences set forth in SEQ ID NO:1 to NO:366 in the Sequence Listing, a nucleic acid comprising a portion of any of those base sequences, and an isolated nucleic acid capable of hybridizing to a complementary base sequence of the foregoing under stringent conditions. It discloses gene sequences relating to favorable or unfavorable prognosis of neuroblastoma and will enable the provision of their genetic information and the diagnosis of favorable or unfavorable prognosis.

### TECHNICAL FIELD

[0001] This invention relates to nucleic acids whose expression is enhanced in human neuroblastoma with favorable prognosis based on comparison between human neuroblastoma with favorable prognosis and human neuroblastoma with unfavorable prognosis.

### BACKGROUND ART

[0002] (Tumorgenesis and Genes)

[0003] Individual tumors exhibit distinct characteristic natures, and their biological properties are not necessarily identical even though the basic principle of oncogenesis is the same. Rapid advances in the understanding of cancer from a molecular biological and molecular genetic perspective in recent years have opened the way to an explanation of oncogenesis and tumor cell biology on the genetic level.

[0004] (Neuroblastomas)

[0005] Neuroblastoma is a pediatric cancer occurring in sympathetic gangliocytes and adrenal medullary cells which originate from cells of the peripheral sympathetic nervous system. Of these sympathetic nervous system cells, neural crest cells in the initial stage of development migrate to the abdomen, differentiating and maturing at sites where sympathetic ganglia are formed. Some of these cells migrate further to the adrenal bodies, penetrating through the adrenal cortex which is already in the process of formation, and reaching the medulla and forming medullary substance there. The neural crest cells also serve as a source of other peripheral nerve cells, differentiating into dorsal root ganglia (sensory nerves), skin pigment cells, thyroid C cells, some pulmonary cells, intestinal gangliocytes, and the like.

[0006] (Prognosis for Neuroblastoma)

[0007] Neuroblastoma is characterized by a varied clinical profile (Nakagawara, Shinkeigashu no Hassei to Sono Bunshi Kiko [Neuroblastoma Development and Molecular Mechanism], Shoni Naika 30, 143, 1998). For example, neuroblastomas occurring at less than one year of age have very favorable prognosis, with the majority undergoing differentiation and cell death, and spontaneous regression. Currently, most neuroblastomas discovered by a positive result in the commonly performed mass screening of 6-month-old infant urine are of the type which tend to undergo this spontaneous regression. On the other hand, neuroblastomas occurring at age 1 or higher are highly malignant and lead to death of the infant in the majority of cases. It is also hypothesized that a somatic mutation occurs in highly malignant neuroblastomas in infants older than one year of age, which are of monoclonal nature, whereas in naturally regressing neuroblastomas, the genetic mutation remains at only a germline mutation. See Knudson A G, et al.: Regression of neuroblastoma IV-S: A genetic hypothesis, N. Engl. J. Med. 302, 1254 (1980)).

[0008] (Genes which allow the diagnosis of prognosis for neuroblastoma)

[0009] With recent advances in molecular biology research, it has become clear that expression of the high affinity nerve growth factor (NGF) receptor TrkA is closely connected with control of differentiation and cell death. See Nakagawara A., The NGF story and neuroblastoma, Med. Pediatr. Oncol., 31, 113 (1998). Trk is a membrane-spanning receptor, existing as the three main types, Trk-A, -B and -C. These Trk family receptors play an important role in specific nerve cell differentiation and survival in the central nervous and peripheral nervous systems. See Nakagawara, et al., Shinkeigasaiboushu ni Okeru Neurotrophin Juyoutai no Hatsugen to Yogo [Expression of Neurotrophin Receptors and Prognosis in Neuroblastoma], Shoni Geka (Pediatric Surgery), 29:425-432, 1997. The survival and differentiation of tumor cells is controlled by signals from Trk tyrosine kinase and Ret tyrosine kinase. In particular, the role of TrkA receptor is most significant, with TrkA expression being notably high in neuroblastomas with favorable prognosis, and its signals exerting a powerful control over survival and differentiation of tumor cells, and cell death (apoptosis). In neuroblastomas with unfavorable prognosis, on the other hand, TrkA expression is significantly suppressed, while tumor development is aided by a mechanism in which survival is promoted by signals from TrkB and Ret.

[0010] It has become clear that amplification of the neural oncogene N-myc has become clearly associated with the prognosis of neuroblastoma. See Nakagawara, Nou-shinkeishuyo no Tadankai Hatsugan [Multistage Oncogenesis of Cerebral and Neural Tumors], Molecular Medicine, 364, 366(1999). This gene, first cloned in neuroblastoma, is ordinarily only present in a single copy per haploid set in normal cells and neuroblastomas with favorable prognosis, whereas it has been found to be amplified several dozen times in neuroblastomas with unfavorable prognosis.

[0011] Up till the present time, however, no oncogene other than N-myc is known to be expressed in neuroblastomas, and absolutely no genetic information other than that of N-myc has been known in relation to favorable or unfavorable prognosis.

### DISCLOSURE OF THE INVENTION

[0012] This invention has been accomplished in light of the circumstances described above, and its object is to identify the gene sequences which are related to favorable or unfavorable prognosis of neuroblastoma, and to allow the provision of their genetic information as well as the diagnosis for favorable or unfavorable prognosis.

[0013] As a result of conducting diligent research, the present inventors have examined the prognoses of neuroblastomas and have succeeded in constructing cDNA libraries from both clinical tissues with favorable prognosis and with unfavorable prognosis. Approximately 2400 clones were respectively obtained from these two types of cDNA libraries and were classified according to the prognosis of neuroblastoma (whether favorable or unfavorable).

[0014] Moreover, the present inventors found that the expression of a considerable number of the genes is enhanced only in clinical tissues of neuroblastoma with favorable prognosis among the classified genes.

[0015] Based on such knowledge, the present inventors have succeeded in providing base sequence information for the detection and cloning of the genes only expressed in clinical tissues with favorable prognosis.

[0016] Furthermore, based on the aforementioned base sequence information on the regions it has been made possible to carry out the method for detection of prognosis and to design tumor markers which can be used therefor, and this invention has thereupon been completed.

[0017] Specifically, this invention aims at providing a nucleic acid whose expression is enhanced in human neuroblastoma with favorable prognosis based on comparison between human neuroblastoma with favorable prognosis and human neuroblastoma with unfavorable prognosis, the nucleic acid comprising any one of base sequences set forth in SEQ ID NO:1 to NO:366 in the Sequence Listing as well as providing a nucleic acid comprising a portion of the base sequence. This invention also provides an isolated nucleic acid characterized in that it hybridizes to the nucleic acid described above or its complementary nucleic acid under stringent conditions.

[0018] The nucleic acids of this invention are those whose expression is enhanced in human neuroblastoma with favorable prognosis based on comparison between human neuroblastoma with favorable prognosis and human neuroblastoma with unfavorable prognosis and those nucleic acids are characterized by their capabilities of being used in the diagnosis for prognosis of human neuroblastoma. The preferred nucleic acid for this purpose is a nucleic acid comprising any one of base sequences set forth in SEQ ID NO:121, SEQ ID NO:125, SEQ ID NO:132, SEQ ID NO:133, SEQ ID NO:165, SEQ ID NO:171, SEQ ID NO:187, SEQ ID NO:188, SEQ ID NO:210, SEQ ID 229, SEQ ID NO:232, SEQ ID NO:273 and SEQ ID NO:281 in the Sequence Listing or a nucleic acid related thereto (e.g., a nucleic acid comprising a portion of the base sequence). The particularly preferred nucleic acid is a nucleic acid comprising any one of base sequences set forth in SEQ ID NO:121, SEQ ID NO:125, SEQ ID NO:132, ID NO:165, SEQ ID NO:171, SEQ ID NO:187, SEQ ID NO:188, SEQ ID 229, SEQ ID NO:232, SEQ ID NO:273 and SEQ ID NO:281 in the Sequence Listing or a nucleic acid related thereto (e.g., a nucleic acid comprising a portion of the base sequence).

[0019] This invention also provides a diagnostic agent for the detection of a neurological disease characterized by containing at least one nucleic acid comprising a portion or the whole of the base sequence set forth in SEQ ID NO:1 to SEQ ID NO:366 in the Sequence Listing. Specifically, such tumor detection diagnostic agents include DNA chips and microarrays both of which are produced using the above-mentioned nucleic acids, for example. Accordingly, this invention also provides a microarray composition characterized by containing plural numbers of nucleic acids comprising a portion or the whole of the base sequence set forth in SEQ ID NO:1 to SEQ ID NO:366 in the Sequence Listing. Preferably, such composition comprises all the nucleic acids, i.e., a total of 366 nucleic acids each of which comprises a portion or the whole of a base sequence set forth in SEQ ID NO:1 to SEQ ID NO:366 in the Sequence Listing. More preferably, the composition is that which contains a total of 13 nucleic acids each of which comprises a portion or the whole of a base sequence set forth in SEQ ID NO:121, SEQ ID NO:125, SEQ ID NO:132, SEQ ID NO:133, SEQ ID NO:165, SEQ ID NO:171, SEQ ID NO:187, SEQ ID NO:188, SEQ ID NO:210, SEQ ID NO:229, SEQ ID NO:232, SEQ ID NO:273 and SEQ ID NO:281 in the Sequence Listing.

[0020] Further according to this invention there is provided an isolated nucleic acid which is DNA characterized by hybridizing to the nucleic acid mentioned above or to its complementary nucleic acid under stringent conditions. There is also provided a diagnostic kit for the prognosis of human neuroblastoma containing as the effective ingredient, a primer set comprising a pair of those nucleic acids (DNA).

[0021] In addition, this invention provides a method of diagnosing the prognosis of human neuroblastoma, the method comprising detecting the presence or absence of a nucleic acid comprising any one of base sequences set forth in SEQ ID NO:1 to NO:366 in the Sequence Listing from a clinical tissue sample of the neuroblastoma.

### BRIEF DESCRIPTION OF THE DRAWINGS

[0022] FIG. 1 is a figure corresponding to an electrophoregram showing an example of the results of determination of the gene expression levels in human neuroblastomas with favorable prognosis and with unfavorable prognosis by semi-quantitative PCR.

[0023] FIG. 2 is a figure corresponding to electron micrographs showing a primary culture containing SCG neurons of a new born mouse.

### BEST MODE FOR CARRYING OUT THE INVENTION

[0024] The term “nucleic acid(s)” as used in this invention refers to, for example, DNA or RNA, or polynucleotides derived therefrom which are active as DNA or RNA, and preferably they are DNA or RNA.

[0025] The term “hybridize under stringent conditions” means that two nucleic acid fragments hybridize to each other under the hybridization conditions described by Sambrook, J. et al. in “Expression of cloned genes in E. coli”, Molecular Cloning: A Laboratory Manual (1989), Cold Spring Harbor Laboratory Press, New York, USA, 9.47-9.62 and 11.45-11.61.

[0026] More specifically, the “stringent conditions” refers to hybridization at approximately 45° C., 6.0×SSC, followed by washing at 50° C., 2.0×SSC. The stringency may be selected by choosing a salt concentration in the washing step from approximately 2.0×SSC, 50° C. as low stringency to approximately 0.2×SSC, 50° C. as high stringency. Also, the temperature in the washing step may be increased from room temperature, or approximately 22° C. as low stringency conditions, to approximately 65° C. as high stringency conditions.

[0027] The term “isolated nucleic acid(s)” as used in the present specification refers to a nucleic acid or a polynucleotide containing substantially no cellular substances or culture medium, if prepared by recombinant DNA techniques, or containing substantially no precursor chemical substances or other chemical substances, if prepared by chemical synthesis.

[0028] The term “favorable prognosis” as used in the present specification refers to a condition of human neuroblastoma in which the tumor is localized or has become a regressing or benign sympathetic ganglion neoplasm, and is judged to have low malignancy based on N-myc or other tumor markers. According to a preferred embodiment of the invention, a favorable prognosis is a case of stage 1 or 2, with an onset age of less than one year and survival without recurrence for 5 or more years after surgery, and with no noted amplification of N-myc in the clinical tissue; however, there is no limitation to such specific cases. The term “unfavorable prognosis” as used in the present specification refers to a condition of human neuroblastoma in which progression of the tumor has been observed, and it is judged to have high malignancy based on N-myc or other tumor markers. According to a preferred embodiment of the invention, an unfavorable prognosis is a case of stage 4, with an onset age of greater than one year, death within 3 years after surgery and noted amplification of N-myc in the clinical tissue; however, there is no limitation to such specific cases.

[0029] The nucleic acids of this invention have been found in the clinical tissues of human neuroblastoma and such nucleic acids have the characteristics described below.

[0030] Neuroblastoma is a tumor consisting of actual nerve cells, of which only two types of tumor are known in humans, and analysis of the genes expressed therein is expected to provide very useful knowledge for understanding the biology of nerve cells. Specifically, it is extremely difficult, and practically impossible, to obtain site-specific homogeneous tissue from the brain or peripheral nerves. On the other hand, a neuroblastoma consists of an almost homogeneous nerve cell population (though tumorized) derived from peripheral sympathetic nerve cells, and thus offers a high possibility of obtaining homogeneous expression of neuro-related genes. Furthermore, since neuroblastoma is a type of cancer, it will characteristically have many important genes expressed in the immature stage of neurogenesis.

[0031] Clinically and biologically, neuroblastoma can be neatly classified into favorable prognosis and unfavorable prognosis types. Cancer cells from neuroblastoma with favorable prognosis are characterized by having a very slow rate of proliferation, with spontaneous regression beginning at some point. Findings to date have confirmed that nerve cell differentiation and apoptosis (nerve cell death) occur in the spontaneous regression, and that the differentiation which occurs in the maturation stages of normal nerve cells and programmed cell death are phenomena very closely resembling each other. Consequently, it is highly probable that the analysis of genes expressed in such tumors will lead to obtaining important information relating to nerve cell differentiation and apoptosis.

[0032] Neuroblastomas with unfavorable prognosis are tumors consisting of cancer cells which continue to exhibit definitely malignant proliferation. The probability is very high, therefore, that they have a large number of important genes connected with nerve cell proliferation or genes expressed in undifferentiated nerve cells. In other words, it is highly probable that these will allow the obtainment of genetic information completely different from the profile of genes expressed in neuroblastomas with favorable prognosis.

[0033] It is commonly reported that nerve cells contain more expressed gene types than cells derived from other organs. Neuroblastoma cell lines are derived from clinical tissues with unfavorable prognosis, and it is believed that the gene expression profile in the case of tumor development and progression is substantially altered from that of normal nerve cells.

[0034] Neuroblastoma is characteristically a pediatric tumor, and because of the very low possibility of effects by acquired factors, it is expected that analysis of the mechanism of cancerization will also yield embryological information with high probability. More surprisingly, the genes or the gene fragments according to this invention include genes whose expression is enhanced only in specific cell cycle phases, and this further suggests the very strong possibility of obtaining genetic information highly useful for the analysis of cancerization mechanisms and related to development and differentiation.

[0035] The nucleic acids, having the characteristics mentioned above and from which the aforementioned information can be obtained, are available from human neuroblastoma clinical tissues and have any of the base sequences set forth in SEQ ID NO:1 to NO:366 in the Sequence Listing, or a portion thereof.

[0036] As a result of comparing gene expression levels in clinical tissues from human neuroblastomas with favorable prognosis and with unfavorable prognosis, a highly significant difference was found in each of the nucleic acids having base sequences set forth in SEQ ID NO:1 to NO:366 in the Sequence Listing. That is, the expression of these nucleic acids was enhanced in human neuroblastomas with favorable prognosis. Thus, in addition to providing the useful genetic information described above, the base sequences set forth in SEQ ID NO:1 to NO:366 can also be utilized as data for tumor markers to diagnose favorable or unfavorable prognosis of neuroblastoma, by detecting DNA and/or RNA having any of these base sequences.

[0037] Specifically, this invention will make it possible to obtain various forms of diagnosis for prognosis on or relating to human neuroblastoma through the following means.

[0038] (1) Probes for Hybridization

[0039] The nucleic acid comprising a portion or the whole of a base sequence disclosed in this invention (which may be referred to as “nucleic acid(s) of the invention”) may be at least used as a probe for hybridization in order to detect genes expressed in human neuroblastoma. The nucleic acids of the invention may also be used as probes for hybridization in order to determine gene expression in various tumors and normal tissues, to identify the distribution of the gene expression.

[0040] When the nucleic acid comprising a portion or the whole of a base sequence disclosed in this invention is used as a probe for hybridization, there are no particular limitations on the actual method of hybridization. As preferred methods there may be mentioned, for example, Northern hybridization, Southern hybridization, colony hybridization, dot hybridization, fluorescence in situ hybridization (FISH), in situ hybridization (ISH), DNA chip methods, and microarray methods.

[0041] As one application example of the hybridization, the nucleic acid of this invention may be used as a probe for Northern hybridization to measure the length of mRNA or to quantitatively detect gene expression in an assayed sample.

[0042] When the nucleic acid of the invention is used as a probe for Southern hybridization, it enables the detection of the presence or absence of the base sequence in genomic DNA of an assayed sample.

[0043] The nucleic acid comprising a portion or the whole of a base sequence disclosed in this invention can also be used as a probe for fluorescence in situ hybridization (FISH) to identify the location of the gene on a chromosome.

[0044] The nucleic acid of the invention can also be used as a probe for in situ hybridization (ISH) to identify the tissue distribution of gene expression.

[0045] When the nucleic acid of the invention is used as a probe for hybridization, a nucleic acid residue length of at least 40 is necessary; and among the gene sequences according to the invention, a nucleic acid having 40 or more contiguous residues is preferably used. More preferably, one having 60 or more nucleic acid residues is used.

[0046] Nucleic acid probe techniques are well known to one skilled in the art, and for example, conditions suitable for hybridization between a probe of specific length according to the invention and the target polynucleotide may be readily determined. In order to obtain hybridization conditions optimal to probes of various lengths, Sambrook et al. “Molecular Cloning: A Laboratory Manual, 2nd Edition, Cold Spring Harbor (1989) may be followed for such manipulations which are well known to one skilled in the art.

[0047] The probe of the invention is preferably labeled in an easily detectable fashion. The detectable label may be any type or portion which can be detected either visually or using devices. As commonly used detectable labels there may be mentioned radioactive isotopes such as ³²P, ¹⁴C, ¹²⁵I, ³H and ³⁵S. Biotin-labeled nucleotides may be incorporated into DNA or RNA by nick translation, chemical or enzymatic means. The biotin-labeled probes are detected after hybridization using labeling means such as avidin/streptavidin, fluorescent labels, enzymes, gold colloidal complexes or the like. The nucleic acid may also be labeled by binding with a protein. Nucleic acid cross-linked to a radioactive or fluorescent histone single-stranded DNA binding protein may also be used.

[0048] (2) Primers for Use in PCR

[0049] For other possible methods of detecting genes, DNA that is the nucleic acid comprising a portion or the whole of a base sequence disclosed in this invention can be used as a primer in a polymerase chain reaction (PCR). For example, RNA may be extracted from a sample to be assayed, and the gene expression can be semi-quantitatively measured by RT-PCR. This may be carried out by a method well known to one skilled in the art. For example, “Molecular Cloning: A Laboratory Manual,” (T. Maniatis, Cold Spring Harbor Laboratory Press) or Idenshibyo Nyumon [Introduction to Genetic Diseases] (Takahisa, S.: Nankodo Publishing) may be followed.

[0050] When the DNA that is a nucleic acid of the invention is used as a PCR primer, a base length of 10 to 60 is necessary; and among the gene sequences according to the invention, the nucleic acid having 10 to 60 contiguous bases is preferably used. More preferably, one having 15 to 30 bases is used. Generally, a primer sequence with a GC content of 40-60% is preferred. Also, there is preferably no difference in the Tm values of the two primers used for amplification. Preferably there is no annealing at the 3′ ends of the primers and no secondary structure is formed in the primers.

[0051] (3) Nucleic Acid Screening

[0052] The nucleic acid comprising a portion or the whole of a base sequence disclosed in this invention can also be used to detect the expression distribution of a gene which is expressed in various tissues or cells. This can be accomplished, for example, by using the nucleic acid of the invention as a probe for hybridization or as a primer for PCR.

[0053] Expression distribution of a gene can also be detected using a DNA chip, microarray or the like. That is, the nucleic acid of the invention may be directly attached to the chip or array. RNA extracted from cells of a tissue may be labeled there with a fluorescent substance or the like, hybridized, and an analysis can be made of the type of tissue cells with high expression of the gene. The DNA attached to the chip or array may be the reaction product of PCR using the nucleic acid of the invention. U.S. Pat. No. 5,605,662 to Heller et al. describes an example of the method for attaching nucleic acids to a chip or array.

[0054] By utilizing the aforementioned technology, it is possible to use as a diagnostic agent, at least one among the nucleic acids comprising portions or the whole of base sequences disclosed in this invention. In recent years, it has becoming clear that the genetic information possessed by individuals governs their susceptibility to a certain disease as well as governs the effectiveness of a particular drug. The DNA chips or microarrays produced using the aforementioned nucleic acids are used to clarify the cause-effect relationship between the disease of a subject and the nucleic acid, which will enable not only the diagnosis of that disease but also the selection of a drug to be administered. Specifically, if the result detected using the DNA chip or microarray is employed as an indicator of selection of a drug to be administered, the expression level of one nucleic acid among the nucleic acids of the invention can be examined but also the expression levels of two or more nucleic acids can be comparatively examined to select the drug to be administered, which will then enable more accurate judgment. As used herein, the disease is not particularly limited insofar as it is that which can be diagnosed by the nucleic acids of this invention. Preferably, the disease is a neurological disease and more preferably, neuroblastoma.

[0055] (4) DNA Cloning

[0056] The nucleic acid comprising a portion or the whole of a base sequence disclosed in this invention can be at least used for cloning a gene which is expressed in human neuroblastoma. For example, by using the nucleic acid of the invention as a probe for Northern hybridization or Southern hybridization, or as a primer for PCR, cloning of a gene containing the nucleic acid comprising a portion or the whole of a base sequence disclosed in this invention is possible. As the genes capable of being subjected to cloning there may be mentioned genes with differing levels of expression particularly between neuroblastoma with favorable prognosis and neuroblastoma with unfavorable prognosis, genes whose forms of expression differ in other tissues or cancer cells, genes whose expression is cell cycle phase-dependent, genes induced upon neurodifferentiation and genes whose expression is regulated by oncogenes or tumor suppressor genes.

[0057] (5) Methods of Diagnosing Tumor Prognosis and Tumor Markers to be Used Therefor

[0058] The nucleic acid comprising a portion or the whole of a base sequence disclosed in this invention can be used as a probe for hybridization, or as a primer for PCR to determine the presence or absence of enhancement in the gene expression in sample cells, which enables the identification of prognosis. To determine the presence or absence of enhancement in the gene expression, any method that utilizes nucleic acids (probes) capable of hybridizing to the nucleic acid comprising any given sequence of the base sequence disclosed in this invention is provided for use. Prognosis can be diagnosed as favorable if the amount of nucleic acid hybridizing to the probe is increased in the sample cell. When the nucleic acid is used as a primer for PCR, RNA is extracted from the sample to be assayed and the gene expression can be semi-quantitatively measured by the RT-PCR method.

[0059] (6) Antisense Oligonucleotides

[0060] According to another embodiment of this invention there are provided antisense oligonucleotides having the base sequences according to the invention. As will be considered in practicing this invention, the antisense oligonucleotides may readily be prepared such that they can bind to RNA corresponding to the base sequence of this invention and can thereby inhibit the synthesis of RNA.

[0061] (7) Gene Therapy

[0062] According to a further embodiment of this invention, there are provided therapeutic genes to be used in gene therapy. As will be considered in practicing this invention, the gene according to this invention may be transferred into a vector for use in gene transportation, whereby the transgene can be expressed by an arbitrary expression promoter and can be used for the gene therapy of cancers, for example.

[0063] 1. Vectors

[0064] The transferable viral vectors may be prepared from DNA viruses or RNA viruses. They may be any viral vector of an MoMLV vector, a herpes virus vector, an Adenovirus vector, an AAV vector, a HIV vector, a Seidai virus vector and the like. One or more proteins among the constituent protein group of a viral vector are substituted by the constituent proteins of a different species of virus, or alternatively a part of the base sequence constituting genetic information is substituted by the base sequence of a different species of virus to form a viral vector of the pseudo-type which can also be used in this invention. For example, there is mentioned a pseudo-type viral vector wherein the Env protein (an envelop protein of HIV) is substituted by the VSV-G protein (an envelop protein of vesicular stomatitis virus or VSV) (Naldini L., et al., Science 272, 263-267, 1996). Further, virues having a host spectrum other than human is usable as the viral vector insofar as they are efficacious. As for the vectors other than those of viral origin, there may be used complexes of calcium phosphate and nucleic acid, ribosomes, cation-lipid complexes, Seidai virus liposomes, polymer carriers having polycation as the main chain and others. In addition, methods such as electroporation and gene guns may be used as a gene transfer system.

[0065] 2. Expression Promoters

[0066] As for the expression cassettes to be used for the therapeutic gene, any cassettes without any particular limitations may be used insofar as they can cause genes to express in the target cells. One skilled in the art can readily select such expression cassettes. Preferably, they are expression cassettes capable of gene expression in the cells derived from an animal, more preferably, expression cassettes capable of gene expression in the cells derived from a mammal, and most preferably expression cassettes capable of gene expression in the cells derived from a human. The gene promoters that can be used as expression cassettes include: for example, virus-derived promoters from an Adenovirus, a cytomegalovirus, a human immunodeficiency virus, a simian virus 40, a Rous sarcoma virus, a herpes simplex virus, a murine leukemia virus, a sinbis virus, a hepatitis type A virus, a hepatitis type B virus, a hepatitis type C virus, a papilloma virus, a human T cell leukemia virus, an influenza virus, a Japanese encephalitis virus, a JC virus, parbovirus B19, a poliovirus, and the like; mammal-derived promoters such as albumin, SR α, a heat shock protein, and an elongation factor; chimera type promoters such as a CAG promoter; and the promoters whose expression can be induced by tetracyclines, steroids and the like.

### EXAMPLES

[0067] This invention will now be explained in greater detail by way of the examples and production examples; however, the invention will not be restricted to those example.

### Production Example 1

### Construction of cDNA Library from Human Neuroblastoma

[0068] 1. Obtaining Samples

[0069] Human neuroblastoma clinical tissue specimens were quasi-aseptically frozen immediately after surgical extraction and then preserved at −80° C.

[0070] 2. Selecting Samples with Favorable Prognosis

[0071] Prognosis of the samples obtained in 1. above was carried out based on the following criteria.

[0072] Favorable prognosis:
[0073] Stage 1 or 2
[0074] Age of onset less than one year
[0075] Survival for longer than 5 years after surgery without recurrence
[0076] No amplification of N-myc

[0077] Unfavorable prognosis:
[0078] Stage 4
[0079] Age of onset older than 4 years
[0080] Death within 3 years after surgery
[0081] Amplification of N-myc

[0082] Amplification of N-myc in the aforementioned sample types was confirmed in the following manner.

[0083] The clinical tissue sample obtained in 1. above was thinly sliced with a scalpel and then thoroughly homogenized after addition of 5 ml of TEN buffer (50 mM Tris-HCl (pH=8.0)/1 mM EDTA/100 mM NaCl). Upon adding 750 μl of SDS (10%) and 125 u 1 of proteinase K (20 mg/ml) to the mixture, it was gently stirred and allowed to stand at 50° C. for 8 hours. This was followed by phenol/chloroform treatment and finally ethanol precipitation to obtain purified genomic DNA. A 5 μg portion of the obtained genomic DNA was completely digested with the restriction endonuclease EcoRI (NEB Inc.), and an N-myc probe was used to determine amplification of N-myc by Southern hybridization.

[0084] 3. Preparation of mRNA from Clinical Tissue of Human Neuroblastoma with Favorable Prognosis

[0085] A 2-3 g portion of the clinical tissue sample of human neuroblastoma judged to have favorable prognosis in 2. above was treated using a Total RNA Extraction Kit (QIAGEN Inc.) and the total RNA was extracted. The extracted total RNA was purified using an oligo dT cellulose column (Collaborative Research, Inc.) to obtain a pool of mRNA with a polyA structure.

[0086] 4. Dephosphorylation of mRNA

[0087] A 100-200 μg portion of the mRNA pool prepared in 3. above was dissolved in 67.3 μl of distilled sterile water containing 0.1% diethyl pyrocarbonate (DEPC), and then 20 μl of 5XBAP buffer (Tris-HCl (500 mM, pH=7.0)/mercaptoethanol (50 mM)), 2.7 A 1 of RNasin (40 unit/μl: Promega Inc.) and 10 μl of BAP (0.25 unit/μl, bacteria-derived alkali phosphatase: Takara Shuzo Co. Ltd.) were added. The mixture was reacted at 37° C. for 1 hour to effect dephosphorylation of the 5′ end of the mRNA. This was followed by phenol/chloroform treatment two times, and finally ethanol precipitation to obtain a purified dephosphorylated mRNA pool.

[0088] 5. Decapping of Dephosphorylated mRNA

[0089] The total amount of the dephosphorylated mRNA pool prepared in 4. above was dissolved in 75.3 μl of distilled sterile water containing 0.1% DEPC, and then 20 μl of 5×TAP buffer (sodium acetate (250 mM, pH=5.5)/mercaptoethanol (50 mM), EDTA (5 mM, pH=8.0)), 2.7 μl of RNasin (40 unit/μl) and 2 μl of TAP (tobacco acid pyrophosphatase: 20 unit/μl) were added. The mixture was reacted at 37° C. for 1 hour to effect decapping treatment of the 5′ end of the dephosphorylated mRNA. The dephosphorylated mRNA of incomplete length with no capped structure remained without decapping, and with the 5′ end dephosphorylated. This was followed by phenol/chloroform treatment and ethanol precipitation to obtain a purified decapped mRNA pool.

[0090] 6. Preparation of Oligo-Capped mRNA

[0091] The total amount of the decapped mRNA pool prepared in 5. above was dissolved in 11 g 1 of distilled sterile water containing 0.1% DEPC, and then 4 μl of 5′-oligo RNA (5′-AGCAUCGAGUCGGCCUUGGCCUACUGG-3′: 100 ng/μl), 10 μl of 10× ligation buffer (Tris-HCl (500 mM, pH=7.0)/mercaptoethanol (100 mM)), 10 μl of magnesium chloride (50 mM), 2.5 μl of ATP (24 mM), 2.5 μl of RNasin (40 unit/μl), 10 μl of T4 RNA ligase (25 unit/μl: Takara Shuzo Co. Ltd.) and 50 μl of polyethylene glycol (50% w/v, PEG8000: Sigma Corporation) were added. The mixture was reacted at 20° C. for 3 hours for ligation of the 5′-oligo RNA to the 5′ end of the decapped mRNA. The dephosphorylated mRNA of incomplete length with no capped structure resulted in no ligation to the 5′-oligo RNA. This was followed by phenol/chloroform treatment and ethanol precipitation to obtain a purified oligo-capped mRNA pool.

[0092] 7. Removal of DNA from Oligo-Capped mRNA

[0093] The oligo-capped mRNA pool prepared in 6. above was dissolved in 70.3 μl of distilled sterile water containing 0.1% DEPC, and then 4 A 1 of Tris-HCl (1 M, pH=7.0), 5.0 μl of DTT (0.1 M), 16 p 1 of magnesium chloride (50 mM), 2.7 μl of RNasin (40 unit/μl) and 2 μl of DNaseI (5 unit/1: Takara Shuzo Co. Ltd.) were added. The mixture was reacted at 37° C. for 10 minutes to dissolve the excess DNA. This was followed by phenol/chloroform treatment and ethanol precipitation and column purification (S-400HR: Pharmacia Biotech Inc.), to obtain a purified DNA(−) oligo-capped mRNA pool.

[0094] 8. Preparation of 1st Strand cDNA

[0095] The DNA(−) oligo-capped mRNA pool prepared in 7. above was reverse transcribed using SuperScript II (kit by Life Tech Oriental, Inc.) to obtain a pool of 1st strand cDNA. The pool of DNA(−) oligo-capped mRNA was dissolved in 21 μl of sterile distilled water, and then 10 μl of 10×First Strand buffer (kit accessory), 8 μl of DNTP mix (5 mM, kit accessory), 6 μl of DTT (0.1 M, kit accessory), 2.5 μl of oligo-dT adapter primer (5 pmol/μl, 5′-GCGGCTGAAGACGGCCTATGTGGCC TTTTTTTTTTTTTTTTT-3′), 2.0 μl of RNasin (40 unit/μl) and 2 μl of SuperScript II RTase (kit accessory) were added. The mixture was reacted at 42° C. for 3 hours to effect reverse transcription. This was followed by phenol/chloroform treatment, alkali treatment and neutralization treatment to dissolve all the RNA and purification was carried out by ethanol precipitation.

[0096] 9. Preparation of 2nd Strand cDNA

[0097] The 1st strand cDNA pool prepared in 8. above was subjected to PCR amplification using Gene Amp (kit by Perkin Elmer Inc.). The pool of 1st strand cDNA was dissolved in 52.4 μl of sterile distilled water, and then 30 μl of 3.3× Reaction buffer (kit accessory), 8 μl of DNTP mix (2.5 mM, kit accessory), 4.4 μl of magnesium acetate (25 mM, kit accessory), 1.6 μl of Primer F (10 pmol/μl, 5′-AGCATCGAGTCGGCCTTGTTG-3′), 1.6 μl of Primer R (10 pmol/μl, 5′-GCGCTGAAGACGGCCTATGT-3′) and 2 μl of rTth (kit accessory) were added. A 100 μl portion of mineral oil was gently added to the mixture and overlayed thereon. After denaturing the reaction solution at 94° C. for 5 minutes, a cycle of 94° C. for 1 minute, 52° C. for 1 minute and 72° C. for 10 minutes was repeated 12 times, and then the solution was allowed to stand at 72° C. for 10 minutes to complete the PCR reaction. This was followed by phenol/chloroform treatment and ethanol precipitation to obtain a 2nd strand cDNA pool.

[0098] 10. SfiI Treatment of 2nd Strand cDNA

[0099] The 2nd strand cDNA pool prepared in 9. above was dissolved in 87 μl of sterile distilled water, and then 10XNEB buffer (NEB Inc.), 100XBSA (bovine serum albumin available from NEB Inc.) and 2 μl of SfiI (restriction endonuclease, 20 unit/μl, NEB Inc.) were added. The mixture was reacted overnight at 50° C. to effect SfiI restriction endonuclease treatment. This was followed by phenol/chloroform treatment and ethanol precipitation to obtain a pool of cDNA which had been SfiI-treated at both ends.

[0100] 11. Size Fractionation of SfiI-Treated cDNA

[0101] The SfiI-treated cDNA pool prepared in 10. above was electrophoresed on 1% agarose gel and a fraction with >2 kb was purified using Geneclean II (Bio101 Inc.). The purified cDNA pool was dissolved in 100 μl of sterile distilled water and allowed to stand at 37° C. for 6 hours. This was followed by phenol/chloroform treatment and ethanol precipitation to obtain a long-chain cDNA pool.

[0102] 12. Preparation of cDNA Library

[0103] The long-chain cDNA pool prepared in 11. above was ligated into the cloning vector pME18S-FL3 (provided by Prof. Sumio Kanno of the Institute of Medical Science, Tokyo University) using a DNA Ligation Kit ver.1 (kit by Takara Shuzo Co. Ltd.). The long-chain cDNA pool was dissolved in 8 μl of sterile distilled water, and then 1 μl of pME18S-FL3 pretreated with restriction endonuclease DraIII, 80 μl of Solution A (kit accessory) and 10 μl of Solution B (kit accessory) were added and reaction was conducted at 16° C. for 3 hours. This was followed by phenol/chloroform treatment and ethanol precipitation for purification to obtain a cDNA library.

### Example 1

### Transformation into E. coli

[0104] The cDNA library prepared in Production Example 1 above was used for transformation into E. coli (TOP-10: Invitrogen Corporation). The cDNA library was dissolved in 10 μl of sterile distilled water and mixed with TOP-10. The mixture was then incubated on ice for 30 minutes, at 40° C. for 1 minute and on ice for 5 minutes. After adding 500 μl of SOB medium, shake culturing was performed at 37° C. for 60 minutes. Appropriate amounts thereof were seeded onto ampicillin-containing agar media and culturing was continued at 37° C. for a day and a night to obtain E. coli clones.

[0105] The E. coli clones on agar media obtained were collected with toothpick and suspended in 120 μl of LB medium prepared in a 96-well plate. The 96-well plate was then allowed to stand overnight at 37° C. for culturing of the E. coli. A 72 μl portion of 60% glycerol solution was then added and preserved at −20° C. (glycerol stock).

### Example 2

### Base Sequence Determination

[0106] 1. Preparation of Plasmid

[0107] The 10 μl of glycerol stock prepared in Example 1 was transferred to a 15 ml centrifugation tube, and then 3 ml of LB medium and 50 μg/ml of ampicillin were added and shaking was carried out overnight at 37° C. for culturing of the E. coli. A QIAprep Spin Miniprep Kit (QIAGEN Inc.) was then used to extract and purify a plasmid DNA from the E. coli.

[0108] 2. Analysis of Both End Sequences

[0109] Both end sequences of the plasmid DNA prepared in 1. above were determined using a DNA Sequencing Kit (kit by ABI). There were combined 600 ng of plasmid DNA, 8 μl of premix (kit accessory) and 3.2 pmol of primers, and sterile distilled water was added to a total of 20 μl. After denaturing the mixture at 96° C. for 2 minutes, a cycle of 96° C. for 10 seconds, 50° C. for 5 seconds and 60° C. for 4 minutes was repeated 25 times for reaction. The product was then purified by ethanol precipitation. Sequencing was carried out by polyacrylamide gel electrophoresis under denaturing conditions, using ABI377 (ABI).

### Example 3

### Homology Search Using Database

[0110] An Internet-mediated DNA sequence homology search was conducted for the samples on which the both end-sequences were analyzed in Example 2. The homology search was conducted using the BLAST of the NCBI (National Center of Biotechnology Information, USA).

### Example 4

### Determination of Gene Expression Levels in Human Neuroblastomas with Favorable Prognosis and Unfavorable Prognosis by Semi-Quantitative PCR

[0111] PCR primers were synthesized from portions of the genes obtained in Example 3, and the expression levels in the clinical tissues of human neuroblastomas with favorable prognosis and unfavorable prognosis were comparatively quantitated. mRNA was extracted from the human neuroblastoma clinical tissues by the method described in Examples 3, and rTaq (Takara Shuzo Co. Ltd.) was used for PCR reaction. Specifically, 5 μl of sterile distilled water, 2 μl of mRNA, 1 μl of 10XrTaq buffer, 1 μl of 2 mM dNTPs, 0.5 μl each of the synthesized primer set and 0.5 μl of rTaq were combined. After denaturing the mixture at 95° C. for 2 minutes, a cycle of 95° C. for 15 seconds, 55° C. for 15 seconds and 72° C. for 20 seconds was repeated 35 times, and then the mixture was allowed to stand at 72° C. for 6 minutes for PCR reaction. The reaction solution was subjected to 1% agarose gel electrophoresis. One example of the results of determination of the gene expression levels in human neuroblastomas with favorable prognosis and unfavorable prognosis by semi-quantitative PCR is shown in FIG. 1. Here, the explanations of the respective lanes are as follows:
[0112] Lanes 1-8: expression of nbla-4183 (SEQ ID NO:154, SEQ ID NO:155 in the Sequence Listing) in a clinical sample of neuroblastoma with favorable prognosis;
[0113] Lanes 9-16: expression of nbla-4183 (SEQ ID NO:154, SEQ ID NO:155 in the Sequence Listing) in a clinical sample of neuroblastoma with unfavorable prognosis;
[0114] Lanes 17-24: expression of GAPDH in a clinical sample of neuroblastoma with favorable prognosis; and
[0115] Lanes 25-32: expression of GAPDH in a clinical sample of neuroblastoma with unfavorable prognosis.

[0116] Consequently, nucleic acids whose expression is enhanced only in human neuroblastoma with favorable prognosis have been identified in the base sequences set forth in SEQ ID NO:1 to SEQ ID NO:366.

### Example 5

### Gene Group with Varying Gene Expression Levels by NGF Regulated Apoptosis in Murine Superior Cervical Gangliocytes

[0117] It is known that NGF (nerve growth factor) exerts protective action against apoptosis in human neuroblastoma induced by an antimitotic agent (such as neocarzinostatin). (Cortazzo M H, J. Neurosci, 16, 3895-3899 (1996)). This action is believed to be due to the inhibition of apoptosis by the binding of NGF to p75. It has also been pointed out that the regression of neuroblastoma (causing favorable prognosis) at clinical stage is connected to the apoptosis of the tumor cells.

[0118] In order to identify the apoptosis-associated genes in neuroblastoma, the gene group with varying gene expression levels by NGF regulated apoptosis in murine superior cervical gangliocytes was examined.

[0119] Superior cervical gangliocytes (SCG neurons) were isolated from C57BL/6J mice (0 to 1 day of age) in 7 to 10 animals. Seven wells of cells were arranged to be grown on a 24-well cell culture plate at about 1 to about 2×10⁴ cells per well. RNA was further collected from about 1 to about 2×10⁴ cells (Day 1 as control).

[0120] After the culture obtained by adding NGF (5 mg/ml) to the 7-well cells was incubated for. 5 days, RNA was collected from one-well cells (+NGF; after 5 days) Cultures in three wells each of the 6 wells were exchanged with cultures with addition of NGF (5 mg/ml) or anti-NGF antibodies (1%), and they were respectively incubated for 12 hours, 24 hours and 48 hours. Using portions of the samples, cells were examined under an electron microscope to identify the morphological differences between the case where NGF had been added and the case where anti-NGF antibodies had been added. The results are shown in FIG. 2. NGF induced differentiation was observed in the cells with NGF addition, whereas apoptosis was observed in the cells with anti-NGF antibody addition. As a result of NGF depletion by the anti-NGF antibodies, it was apparent that apoptosis was induced. RNA was collected from the respective well cells after 12 hr, 24 hr, and 48 hr culturing. These samples were denoted +NGF 12 hrs, +NGF 24 hrs, +NGF 48 hrs, −NGF 12 hrs, −NGF 24 hrs, and −NGF 48 hrs.

[0121] As described above, RNAs of the respectively treated cells from approximately 160 mice were concentrated by ethanol precipitation and cDNAs were synthesized from 1 μg RNAs using reverse transcriptase. These cDNAs were used as templates and gene expression levels were compared by PCR. The primers used were constructed from the homologous genes in mice based on the genes found in human neuroblastoma cells. The base sequences of the primers used for the comparison of expression are summarized in Table 1 together with the gene identification numbers (ID) for the targeted genes for comparison.

TABLE 1

| | | | |
|---|---|---|---|
| primer | primer sequence | primer | primer sequence |

| | | | |
|---|---|---|---|
| nbla00031m-F3 | TCAGAAGGCTTCGAGACTG | nbla00031m-R3 | GCAGATATCTTGTCAAAGGT |
| nbla00100m-f | GGTGAGCCCTAACATCCACA | nbla00100m-r | AGCCCGTAAGCCATCAATC |
| nbla00115m-F3 | ATCATGGTGAAAGGCACGTC | nbla00115m-R3 | CATAATTTCCACGTGTTGTG |
| nbla00116m-F3 | AGAGGTTAGCCCTGAGACAG | nbla00116m-R3 | TCTATGCTTCCAGCAGGTAC |
| nbla00124m-F3 | CCTTTATATTAGAACGTGGC | nbla00124m-R3 | TAGGTTTTCAGGACTTGG |
| nbla00144m-F | GCAGGATAGCAACCTTGACA | nbla00144m-R | ATGCATGCTTTCGTGTGTTC |
| nbla00150m-2f | CACCCTGGAGAAACACAAACTC | nbla00150m-2r | ATGCCGTCCATCTTCATCAC |
| nbla00170m-F3 | AACATGAATCTGTGGGTGAC | nbla00170m-R3 | TCAATCGCTTGACCTTCCTC |
| nbla00204m-F3 | AAGCATTGAAGTAACAACCG | nbla00204m-R3 | TGCATTTGACATATGAGAGC |
| nbla00225m-F2 | TATTAGAACGTGGCCCTCCA | nbla00225m-R2 | TCGGGACTAGCAGGACAGAA |
| nbla00301m-F3 | TAAACCAGCAACCCTAACAG | nbla00301m-R3 | ACTAGAATCAGACCTGCCTT |
| nbla00315m-F | AACTGGCAGCAAAGAAGGTC | nbla00315m-R | AGCAGAAGCACGTCAGTAAGG |
| nbla00402m-F2 | TCACCCAGAATGAGACATGG | nbla00402m-R2 | GTCAGAAGGTGACACGGTGA |
| nbla00433m-F3 | CCCAAGGAGGTAAGAGCCTG | nbla00433m-R3 | AAGCGCTGGAGCTTGTCGGT |
| nbla00437m-F3 | AGAACGGTGTAATTCAGAGA | nbla00437m-R3 | GTCATCAGCAAGCTCGAATA |
| nbla00537m-F3 | TTTATATTAGAACGTGGCCC | nbla00537m-R3 | AGGACTTGGTAGCTTCTCGG |
| nbla00551m-F | AATTTTAAAAAGGCAGGATATACAAC | nbla00551m-R | AAGGAGAGGTAGCATTTTATGTGC |
| ori00660m-F | GGCATCCTCATCTCCTCAGA | ori00660m-R | TCTGAAGCAGTTCGAAGCAC |
| nbla00761m-f | TGGTTCAAACTCTTCCCTCCT | nbla00761m-r | CTTCCACCTGTGCGTTTTCT |
| nbla00831m-F3 | TGGGAAATCCACCTGCATC | nbla00831m-R3 | ACCAGCTCACCCTGAATGTG |
| nbla00908m-2f | CGTGGCAACACCTTTTTATTC | nbla00908m-2r | ACACGGCATGGGTTTGTT |
| nbla02874m-f | TGAGGAGTTGAATGCTGACCT | nbla02874m-r | CATCGGGGTTAATGCTCTTG |
| nbla03086m-f | ACTTGCTCATGGTGCTGTCTC | nbla03086m-r | CGCAGAGCCTGGTAATCTTC |
| nbla03113m-F | CCTCAAGAACCAGACCAAGC | nbla03113m-R | CTGATGCTGAGGAGCTGACA |
| nbla03199m-f | GGCCACCAGAGAGGTAATG | nbla03199m-r | GTGCTGACCTAAGACCCAAAG |
| nbla03267m-f | CTGCCTTTGAGATGGTGATG | nbla03267m-r | TGTAGTGCTTTGCATTGTTGG |
| nbla03646m-f | TACCTCTTCGGCTGGATGG | nbla03646m-r | GCTTGGGCAGGATGAATG |
| nbla03755m-F | AGCCGATGAAGTGTCTGCTT | nbla03755m-R | RAGCCACAAAAGCAGGTTAGG |
| nbla03771m-f | GCAGCAGATATAGGGACACAGA | nbla03771m-r | CACGCATAAATGGCTACACC |
| nbla03777m-F3 | AGATTATTCACCTGTAAGC | nbla03777m-R3 | TTTTCCACATGTCCAGCACC |
| nbla03831m-f | GTGACCAGCAAGGAAACACA | nbla03831m-r | GAGGATTCAGCCACGAACA |
| nbla03862m-F | GCATGGAGGAAACCATTAGG | nbla03862m-R | TGGCTCTTCAACCAAACCTT |
| nbla04021m-F2 | ATGACCTGGCACTAGGCTTG | nbla04021m-R2 | AACACATCTGCTGGCTTCTG |
| nbla04137m-f | ACGACGACACTGACAACCAC | nbla04137m-r | GCTTGACCTCCGACTCATCT |
| nbla04196m-f | CACCCATCTGTGTCTGTGGT | nbla04196m-r | CGTGCTGACGATGATGTTG |
| nbla04261m-2f | GTGTTTGGCACTACATCACCA | nbla04261m-2r | CCGGGTTTTCCATTTTCAC |
| nbla04300m-f | TACAGTGGGAACTGCGTTTG | nbla04300m-r | CAGGGTTCGTATGCAGGAG |
| nbla10058m-f | AGCCATTACAGGTGGCAAGA | nbla10058m-r | GTTGGGTCGATCTTAGGAGGTAG |
| nbla10070m-F3 | TAACAACTCTAGCACCATC | nbla10070m-R3 | TACTTAGCAGAACAGAAGAG |
| nbla10071m-f | GTGGACACCAAGAATGCAAG | nbla10071m-r | CAGCCAACTGTGGTAAGAAGG |
| nbla10120m-F | CAGTGCAGCCTTGGAAGTGT | nbla10120m-R | TCAAAAGCTGCGTGTGTCTC |
| nbla10143m-F3 | TTAGTGAGTACACGAGCTGG | nbla10143m-R3 | ACTTAACCCAGACTGACCAC |
| nbla10283m-F3 | AGATGTTTAAGGGCAAACC | nbla10283m-R3 | TGGAGCCTCTTGGATCTC |
| nbla10300m-F3 | AACATCCTGGTGGAACAGC | nbla10300m-R3 | CTCTATAGTAACGACCAAAC |
| nbla10314m-f | GCTTGAGGACAGTGAAAACCA | nbla10314m-r | TGGAGTGAGAGGATGGGAAG |
| nbla10317m-2f | GCAGGGGACACAGGACTCTAC | nbla10317m-2r | AAGCTCCTTCTGGCTCAACA |
| nbla10329m-F | CCGAGATCTTCTGCCTTCAT | nbla10329m-R | TCCTTGCCGTCTCAAACTCT |
| nbla10363m-F3 | ATCTCTCTAGTGCCATGAC | nbla10363m-R3 | AGTCTTGCTAAGACTTTCAG |
| nbla10383m-f | CAGTGCGGTTGTGGTCTATCT | nbla10383m-r | TGAGGCGTTGACTTTCTGG |
| nbla10388m-F | TTCAGCAGGTCCTAGCCAAG | nbla10388m-R | RTGGAAGCTGCTGAAGAAACA |
| nbla10457m-F | GCCTTTCTTTGTCTGGAACG | nbla10457m-R | GGGTGAAGCAATTTCACAGG |
| nbla10485m-F | AAATGGCAGTTTGACTGTGG | nbla10485m-R | TTGGCTGAGTTCTCCCTCAT |
| nbla10527m-F3 | ATTAATCCTGCACTCTTACG | nbla10527m-R3 | AGTTCCATTTCTACAGCAAG |
| nbla10535m-F | TTGGTCGTGAGGTGGATTCT | nbla10535m-R | ATCTTGCCAGCCACAGACTT |
| nbla10545m-F | AGAGTCACCTGCGACCCTTA | nbla10545m-R | AGCTCTAGCAGCCAGCACAT |
| nbla10677m-f | CATAATCTTCTCCGGCTTCATC | nbla10677m-r | GTCTGGTATTTCCGTGAGGTTT |
| nbla10687m-F3 | ATCTCCCATCGACTCACTGC | nbla10687m-R3 | TGGCTTTACTGGTCATACAG |
| nbla10696m-f | TGATTCTCCAAGGCAAGGT | nbla10696m-r | GATTTCCCCATTGACTGCT |
| nbla10988m-2f | AGCCTTTGCTACCCTCTTGC | nbla10988m-2r | GGCGAAACACTCCTCTCGT |
| nbla11030m-F3 | AACCTCGTAAAAACCATGGC | nbla11030m-R3 | AGCAGTGACTTGAGCATTTG |
| nbla11042m-2f | CGACACCTCTCATTGCACAC | nbla11042m-2r | TCCGTCTCAAATCCACACAC |
| nbla11051m-f | AGCACAATTCCCCAGACAC | nbla11051m-r | CTGTAGCCCTTACTGTTTGACC |
| nbla11189m-F | CTGTGTTCTGATGCCAATGC | nbla11189m-R | TGCAACTTTCTCCACCAAGA |
| nbla11589m-F2 | GGAGCTAGCCAAGATGATCG | nbla11589m-R2 | CTGGCCATCCTAGAGGAGAA |
| nbla11882m-F | AATTTTAAAAAGGCAGGATATACAAC | nbla11882m-R | AAGGAGAGGTAGCATTTTATGTGC |
| nbla11895m-F3 | AATCTTCCTCCCAACCCATG | nbla11895m-R3 | TGACCCTGCTGAAGGAAGCG |
| nbla20001m-F2 | CCCTGAATGTTGAACGAGTG | nbla20001m-R2 | TGCACATTGAAGAGGCAAAC |
| nbla20019m-F1 | CCGAGGTCAACATTTGTTCC | nbla20019m-R1 | GAGCAGAGCACAGACAGTGG |
| nbla20125m-F1 | CTGGAATCATCCAGGCTTTG | nbla20125m-R1 | GCGTCCAGGATAACAGCACT |
| nbla20134m-F1 | GTCTTCAAGCAGCGACAGTG | nbla20134m-R1 | CCTTCAGGGTCTGGTTGATG |
| nbla20146m-F1 | GGGACCACTAACCAGCTGAA | nbla20146m-R1 | AAATGTCTGACCCCTCCTCA |
| nbla20181m-F1 | CCAGGATGGAGTAGCCAAGA | nbla20181m-R1 | GCCAGTGATCTCCAGGTTTG |
| nbla20182m-F1 | ACTGGGGAGGAATGGCTAGT | nbla20182m-R1 | CTGGCTGGAGGAAAAAGGAC |
| nbla20211m-F1 | CTGAGGTGCTGATGATCCTG | nbla20211m-R1 | CCAAACTCCTGCTCTTCTCG |
| nbla20231m-F1 | AGCAGTTTGGTGCTGTTGGT | nbla20231m-R1 | GCTTGTTCCATGGTTGGACT |
| nbla20250m-F2 | ACGAGGACCACAGGACTCAA | nbla20250m-R2 | TGGGCTCCATAGTTTGTTCC |
| nbla20268m-F1 | ATTCTCTCTGGAGGCGATGA | nbla20268m-R1 | TTTCCTCACAGCTCCCTCTC |
| nbla20378m-F2 | TTTAGCTGTTTGCAAATAAGATGT | nbla20378m-R2 | AATGCAGTGTGTGGGATGTG |
| nbla20421m-F1 | TCCGACATGATGGTTCTCCT | nbla20421m-R1 | AGATCCAGGAGTCACCCAAA |
| nbla20487m-F3 | CACAGGTGTCAAAGCACGTT | nbla20487m-R3 | TGTAGCACTCGCTGTTGCTC |
| nbla20511m-F1 | TCCTGAAGCCTTCTTGCCTA | nbla20511m-R1 | GCTTGTGGCAACCAGAAAGT |
| nbla20541m-F1 | AGGTGGGAGTCGACCTTTCT | nbla20541m-R1 | GCATCCTTCAACTTGGTCCT |
| nbla20638m-F1 | GCAGCAAGGAAGAGGACAAG | nbla20638m-R1 | AGCAATCTTCGTCTGGGAAG |
| nbla20688m-F1 | AGAAGGACCTCCTCCCAAAG | nbla20688m-R1 | TGCAACAGTCCTCTTCCTTG |
| nbla20709m-F2 | ATTAGTTGGGACCTGCCTTG | nbla20709m-R2 | GCCCATTTTCTTCAGCAGAG |
| nbla20765m-F1 | AGAGCAGCTCAGCTACCACA | nbla20765m-R1 | GAAGGCAACTTTGGTGTTGG |
| nbla20798m-F1 | AAACGGGTACAGGATGGAGA | nbla20798m-R1 | CAACTGGAGGTCGGAGGATA |
| nbla20874m-F1 | TGGTCTGTTTAACAATTGACCTG | nbla20874m-R1 | GCTGCATCTTCCAACATTCTT |
| nbla20968m-F1 | CCGTGCAGTTTGACATGAAT | nbla20968m-R1 | TGTGGCATCTCATTCAGCAT |
| nbla21013m-F1 | CACCCTTTGAAGTGACGGTA | nbla21013m-R1 | CTGAAAAACCAGCCCACACT |
| nbla21024m-F1 | CTCTGTGGGATGACACATGC | nbla21024m-R1 | TTTGGCACCTTGTCATTTTG |
| nbla21077fm-F1 | CCTGCTTAAGAGTAAGCCTGGT | nbla21077fm-R1 | AGTTCTGTGGGCTATAGGATCG |
| nbla21130m-F1 | TGTGTCTTCCGACTTTCTGG | nbla21130m-R1 | TCTTTCCCTGAGTGCTTGGT |
| nbla21189m-F1 | AGAGGTGGAAGCACTTCAGG | nbla21189m-R1 | AAAGTCCTTGGTGCTCTCGT |
| nbla21233m-F1 | CTGGAGCCTGTTTGATGGTT | nbla21233m-R1 | TGCTTTCCTTACTGGCAGGT |
| nbla21266m-F1 | GAACATGGGCACTGACTGG | nbla21266m-R1 | CATCAGGGCTAGGAGACTCG |
| nbla21297m-F3 | CAGCAATGAATCCTCCAATGT | nbla21297m-R3 | TGGTGGTTCTCCCTGTGATT |
| nbla21298m-F2 | AGACCAGTGGCTCGTCAAAC | nbla21298m-R2 | TTGCAGACATCAGGGGTGT |
| nbla21337m-F2 | TCTGCACCAGAGAATCCACA | nbla21337m-R2 | ATAGGGCTTTTCTCCCGTGT |
| nbla21367m-F1 | CAGAAAAACGGTGGAGGACT | nbla21367m-R1 | CCCTGCCTTGTTCTCCATAA |
| nbla21375m-F1 | CAAGCATGCAGGAAGAACTC | nbla21375m-R1 | AATGTTCGTAGCCGATCCAG |
| nbla21413m-F1 | TGTGTTTGCTGGGGAGTATG | nbla21413m-R1 | TCATTTGCAGCCACTCTACG |
| nbla21569m-F1 | TGGAGCTCAGAAGAGGAGGA | nbla21569m-R1 | CGCAACATGAAGTCCATCAG |
| nbla21681m-F1 | CAAAGTCCCTCTCCTTCAGC | nbla21681m-R1 | CCCTAGTGGCCAACTCTGAT |
| nbla21761m-F1 | TTACCCAGGTGGTTCAGCAT | nbla21761m-R1 | TACCCATCAGGGTGATGACA |
| nbla21843m-F1 | GCCAGGAAGTGAGGAATGAG | nbla21843m-R1 | CCCGGATGACCTGAATGTAG |
| nbla21855m-F1 | AACACACTGGCGTTCATCTG | nbla21855m-R1 | GACTCCCACTTGCGTCTCTG |
| nbla21922m-F1 | GACATGGAAGGCATGCTGTA | nbla21922m-R1 | GACAGACGCTTCAGCGAAAT |
| nbla21934m-F1 | AGCCTTGGTGCTGAAGATGT | nbla21934m-R1 | CTTATGTGACCGTGCACCTG |
| nbla21936m-F1 | CGCCTGACAATCTCAATTCC | nbla21936m-R1 | CTCACGTGTCTGCGTTTGAT |
| nbla21950m-F1 | AGGGGATCCGGAAGTATGAC | nbla21950m-R1 | AAGCCGCTCATCTGGTAGAG |
| nbla22027m-F1 | TGAGAAAACGGTCCTGAAGC | nbla22027m-R1 | TGTCAGACCCTTGGCATCTT |
| nbla22028m-F1 | TACCTGAGTCGGACACGATG | nbla22028m-R1 | GAGAGCCAGACAAGCTTTGG |
| nbla22093m-F1 | ACAAGGACCCCTGTGCTAAC | nbla22093m-R1 | TGAGGACAGTGGCAGGTGTA |
| nbla22153m-F1 | TGCGAGGATTAACTCCAAGG | nbla22153m-R1 | GGCAACTTTGGCTGAAGAGT |
| nbla22182m-F2 | AGTCCCCATTGGGATACTGC | nbla22182m-R2 | TGGGCAATAATTTGGAAACC |
| nbla22218m-F1 | AGCCACACTGTTAGCAGCAA | nbla22218m-R1 | CGAATGTCCAGAAGGGAGAG |
| nbla22228m-F1 | CAGCCTGTGAATGGTGTGAA | nbla22228m-R1 | TGAGGGAAGCTGTGGAAGAG |
| nbla22298m-F1 | TGACATCTGCTTGTCCTTGG | nbla22298m-R1 | GGACGGCAGTACCAAGAGTG |
| nbla22344m-F2 | GAGTCTGCCATTGGCTTTGT | nbla22344m-R2 | CTGCTTGCTCTGTTCCACTG |
| nbla22351m-F1 | AGACAGGGTCTGGCTGTGTT | nbla22351m-R1 | TGAGGCCAGGAGTTCAAGAC |
| nbla22352m-F1 | CTGGCACAATGTCTTCACAA | nbla22352m-R1 | TTGAAAGGGGAGATTCCTGA |
| nbla22361m-F1 | CGACAGATGACCTTGATTCG | nbla22361m-R1 | GCCTCAGAAGCCTTTCTCAA |
| nbla22382m-F1 | GTTGGCGAGCTAGCAAAACT | nbla22382m-R1 | TGCCATCCTTCTCACAGATG |
| nbla22394m-F1 | TTACCCATAATGCCCTCCAC | nbla223944m-R1 | CAAAACGACAGCAGCAGAAC |
| nbla22451m-F1 | GGCATTGGAGGTTGTCATTC | nbla22451m-R1 | GCTTGCTCTTCACCAGGAAC |
| nbla22455m-F1 | GAAGACCCTGGTTTTTGCAG | nbla22455m-R1 | CAACTCGGTTGGTGAAATCAG |
| nbla22465m-F1 | AGGAGAAGCCTCATCAACCA | nbla22465m-R1 | TCAGGCAGACATTCCCAGAT |
| nbla22474m-F1 | AATGTGCCGGTTTTCTCATC | nbla22474m-R1 | CCAACCCCTTAGACATGCAC |
| nbla22549m-F1 | TCTGTGAAAGGGCATGTGAG | nbla22549m-R1 | GGAGGGATTTCATTGCTCTG |
| nbla22704m-F1 | TCTCAGTTGGGTTTGGAAGC | nbla22704m-R1 | GGAGAAAAGCCAGAGTGTCG |
| nbla22832m-F1 | CACGGGAACCCATTTGTATG | nbla22832m-R1 | GTGGAAGGAGCCGTTGATAA |
| nbla22886m-F1 | ATCGGCAGAGTGCATACCTT | nbla22886m-R1 | TCTGTGGCTCAATACGCTTG |
| nbla23020m-F1 | TTCCCACCAAATCAGTCTCC | nbla23020m-R1 | TGGCCACTGAAGTCTCAGGT |
| nbla23038m-F1 | ATGGTGAAAGTGGTTCAGTGC | nbla23038m-R1 | TGCATTTGCTGTGGATTACC |
| nbla23060m-F1 | GTGGCACAGTGGGAGCTATT | nbla23060m-R1 | GCCCAATCCTCTAAACAACG |
| nbla23218m-F1 | GTAAACAGCCCCTTGGTCAG | nbla23218m-R1 | ATGTGCAGTGTTCCCCACTT |
| nbla23394m-F1 | CAAGCGGTGGAGTACTTGAA | nbla23394m-R1 | CCTGCAGTTCCCAGTCTTTC |
| nbla23512m-F1 | CCCAGCCAGCCAAGTAGATA | nbla23512m-R1 | ACCCCACTCTTTGGGTCTCT |
| nbla23653m-F1 | ACTGGGCATCTGGATAGCAG | nbla23653m-R1 | CTTCGGAACCAGCCAACTTA |
| nbla23664m-F1 | TGAGGGGCTTCAAGCAGTAG | nbla23664m-R1 | GCACACTCACTTCCCAAGGA |
| nbla23666m-F1 | CGTGGTGGTGTGTATTTTGG | nbla23666m-R1 | GCGGTGACATAAAAGGCTGA |
| nbla23718m-F1 | ATGGAGAACTTGCCTGCACT | nbla23718m-R1 | TCAGCTTCACCCACACTTTG |
| nbla23719m-F1 | CTGTGGAGGAGTGGGATGTT | nbla23719m-R1 | GTTGCTTTTGGTTTCCCATC |
| nbla23760m-F1 | TGTGAGTCCTCCTGTTGTGG | nbla23760m-R1 | GAGCTGTCAAAATGGCTTCC |
| nbla23951m-F1 | TCACAGTTGCTGCCAAAGAG | nbla23951m-R1 | CGTCCCATTTTCCAGAGATG |
| nbla23973m-F1 | ACCAGTGTGAGGTGGTCAGA | nbla23973m-R1 | GTGGGAGGCCACAAACTTAG |
| nbla24082m-F1 | GGAGCAATCCAAGGAGATGA | nbla24082m-R1 | TGGACAGCCTCCTTCAGTTT |
| nbla24084m-F1 | GGTCGTTTAGGTGGCAAATG | nbla24084m-R1 | CCCAGGAATCTGCAAGGATA |
| nbla24104m-F1 | GTTGATGGAGCACCACAGAA | nbla24104m-R1 | CTGCATTGTTCAGCCAGGTT |
| nbla24131m-F1 | CACCAATGCTGTGAACTTGC | nbla24131m-R1 | TGACAGTCCAGCCTCACAGA |
| nbla24239m-F1 | TGGACACGCATAAGAAGCAG | nbla24239m-R1 | TGTCGAAGAAACTCCTGACG |
| nbla24285m-F1 | GTGGTGTGATGTCTGCCATT | nbla24285m-R1 | CCTTGTTGGACCTTGATTCC |
| nbla24297m-F1 | AAGGCTCTTTCCAGGAGGTC | nbla24297m-R1 | CCTTCAGGACACACAGGCTTA |
| nbla24348m-F1 | TAGTCCCCAAACCTGCTGTT | nbla24348m-R1 | GGCGAAGAAGAATTTGAACG |
| nbla24434m-F1 | GCCTGTGGTCAAAATCCAGT | nbla24434m-R1 | CTTTGCCTCAGTGGCTCTTC |
| nbla24460m-F1 | TTTCCAGGAGGTCAGGTTTG | nbla24460m-R1 | CCTTCAGGACACACAGGCTTA |
| nbla24468m-F1 | TGACAAAGACGCTGAACTGG | nbla24468m-R1 | GGGTTGTCAGAAAGCCTGAG |
| nbla24521m-F1 | TAATGGGAGTGCTGCCTCTG | nbla24521m-R1 | CATCTTTAAGGCTAACATGC |
| nbla24526m-F1 | AAGGAGCGCACCAACAGTAT | nbla24526m-R1 | ATAGGGTGGCTCAGGGAAAT |
| nbla24622m-F1 | GCACTTGGACCTCCCTTGTA | nbla24622m-R1 | GGTCCTGCACATTTCAACAG |
| nbla24672m-F1 | GGGCAGGACAATAAGACTGC | nbla24672m-R1 | TGTCCACAGCAGACACCCTA |
| nbla24686m-F1 | AAGAAGGCTCCGAGCTCAAT | nbla24686m-R1 | TCTGTGAGCTCCAGGCAGTA |
| nbla24709m-F1 | GCAGCATTCTGAGACACAGG | nbla24709m-R1 | GCTGGAGAGACCCAAGGACT |
| nbla24719m-F1 | CAGGGGATAACCTTCGTCAA | nbla24719m-R1 | AAGCAGCAACGTGGGATAAC |
| nbla24756m-F1 | ACATTGACAACCCTCCCAAG | nbla24756m-R1 | AAAGCAGCAGCCTCAGAGAA |
| nbla24831m-F1 | AAACGCTTGAGCTCTTCCAC | nbla24831m-R1 | AGCTCAGCAACCGCTCTAAA |
| nbla24893m-F1 | AGAGGGGCCAAGGGATATAA | nbla24893m-R1 | TACGAGGGCCTGTTTCAGAT |
| nbla24908m-F1 | TTCAGAGCATCGAGTTCACG | nbla24908m-R1 | TCATCCTCCTGGGTGAAGTT |
| nbla24972m-F1 | TCACCAAAACTGGCACAGAG | nbla24972m-R1 | TCGGACTGTGCTGCATTCTA |
| nbla24973m-F1 | CTGCACACCTCTCAATGCAG | nbla24973m-R1 | GAAGCAGCCCGATGTGTT |
| nbla24986m-F1 | CAGAGCAGTAACCGTGACCA | nbla24986m-R1 | ACCAGGACGGACACTGTTGT |

[0122] The results described below were obtained with the genes for which variations in the gene expression level were observed. The genes whose expression levels were decreased notably by NGF depletion (−NGF) were nbla-03646 (SEQ ID NO:121) (−NGF 12 hrs), nbla-03771 (SEQ ID NO:125) (−NGF 12 hrs), nbla-03831 (SEQ ID NO:132) (−NGF 24 hrs), nbla-04300 (SEQ ID NO:165)(−NGF 24 hrs), nbla-10120 (SEQ ID NO:171) (−NGF 48 hrs), nbla-10329 (SEQ ID NO:187) (−NGF 24 hrs), nbla-10363 (SEQ ID NO:188) (−NGF 12 hrs), nbla-10677 (SEQ ID NO:229)(−NGF 12 hrs), nbla-10696 (SEQ ID NO:232) (−NGF 12 hrs), nbla-11051 (SEQ ID NO:273) (−NGF 24 hrs), and nbla-11189 (SEQ ID NO:281)(−NGF 24 hrs). The genes whose expression levels were increased notably by NGF depletion (−NGF) was noted were nbla-03862 (SEQ ID NO:133) (−NGF 24 hrs) and nbla-10485 (SEQ ID NO:210) (−NGF 24 hrs) The gene whose expression level was increased notably by NGF addition was noted was nbla-10143 (SEQ ID NO:174)(+NGF).

[0123] The primer sets used to amplify those particular genes are shown in Table 2.

TABLE 2

| | | | |
|---|---|---|---|
| primer | primer sequence | primer | primer sequence |

| | | | |
|---|---|---|---|
| nbla03646m-f | TACCTCTTCGGCTGGATGG | nbla03646m-r | GCTTGGGCAGGATGAATG |
| nbla03771m-f | GCAGCAGATATAGGGACACAGA | nbla03771m-r | CACGCATAAATGGCTACACC |
| nbla03831m-f | GTGACCAGCAAGGAAACACA | nbla03831m-r | GAGGATTCAGCCACGAACA |
| nbla03862m-F | GCATGGAGGAAACCATTAGG | nbla03862m-R | TGGCTCTTCAACCAAACCTT |
| nbla04300m-f | TACAGTGGGAACTGCGTTTG | nbla04300m-f | CAGGGTTCGTATGCAGGAG |
| nbla10120m-F | CAGTGCAGCCTTGGAAGTGT | nbla10120m-R | TCAAAAGCTGCGTGTGTCTC |
| nbla10143m- | CAGTGCAGCCTTGGAAGTGT | nbla10143m- | TCAAAAGCTGCGTGTGTCTC |
| F3 | | R3 | |
| nbla10329m-F | CCGAGATCTTCTGCCTTCAT | nbla10329m-R | TCCTTGCCGTCTCAAACTCT |
| nbla10363m- | ATCTCTCTAGTGCCATGAC | nbla10363m- | AGTCTTGCTAAGACTTTCAG |
| F3 | | R3 | |
| nbla10485m-F | AAATGGCAGTTTGACTGTGG | nbla10485m-R | TTGGCTGAGTTCTCCCTCAT |
| nbla10677m-f | CATAATCTTCTCCGGCTTCATC | nbla10677m-r | GTCTGGTATTTCCGTGAGGTTT |
| nbla10696m-f | TGATTCTCCAAGGCAAGGT | nbla10696m-r | GATTTCCCCATTGACTGCT |
| nbla11051m-f | AGCACAATTCCCCAGACAC | nbla11051m-r | CTGTAGCCCTTACTGTTTGACC |
| nbla11189m-F | CTGTGTTCTGATGCCAATGC | nbla11189m-R | TGCAACTTTCTCCACCAAGA |

[0124] As described above, because the superior cervical gangliocytes are known to die (apoptosis) through NGF depletion, the genes that display variations in the expression level are closely connected to the mechanism of apoptosis.

### INDUSTRIAL APPLICABILITY

[0125] As described above, this invention discloses gene sequences relating to favorable or unfavorable prognosis of neuroblastoma and will enable the provision of their genetic information and the diagnosis of favorable or unfavorable prognosis.

1. A nucleic acid whose expression is enhanced in human neuroblastoma with favorable prognosis based on comparison between human neuroblastoma with favorable prognosis and human neuroblastoma with unfavorable prognosis, the nucleic acid comprising any one of base sequences set forth in SEQ ID NO:1 to NO:366 in the Sequence Listing.

2. The nucleic acid according to claim 1, wherein the base sequence is any one of base sequences set forth in SEQ ID NO:121, SEQ ID NO:125, SEQ ID NO:132, SEQ ID NO:133, SEQ ID NO:165, SEQ ID NO:171, SEQ ID NO:187, SEQ ID NO:188, SEQ ID NO:210, SEQ ID 229, SEQ ID NO:232, SEQ ID NO:273 and SEQ ID NO:281 in the sequence listing.

3. The nucleic acid according to claim 1, wherein the base sequence is any one of base sequences set forth in SEQ ID NO:121, SEQ ID NO:125, SEQ ID NO:132, ID NO:165, SEQ ID NO:171, SEQ ID NO:187, SEQ ID NO:188, SEQ ID 229, SEQ ID NO:232, SEQ ID NO:273 and SEQ ID NO:281 in the Sequence Listing.

4. A nucleic acid comprising a portion of any one of base sequences set forth in SEQ ID NO:1 to NO:366 in the Sequence Listing.

5. The nucleic acid according to claim 4, wherein the portion of the base sequence is derivable from any one of the base sequences set forth in SEQ ID NO:121, SEQ ID NO:125, SEQ ID NO:132, SEQ ID NO:133, SEQ ID NO:165, SEQ ID NO:171, SEQ ID NO:187, SEQ ID NO:188, SEQ ID NO:210, SEQ ID 229, SEQ ID NO:232, SEQ ID NO:273 and SEQ ID NO:281 in the Sequence Listing.

6. The nucleic acid according to claim 4, wherein the portion of the base sequence is derivable from any one of the base sequences set forth in SEQ ID NO:121, SEQ ID NO:125, SEQ ID NO:132, ID NO:165, SEQ ID NO:171, SEQ ID NO:187, SEQ ID NO:188, SEQ ID 229, SEQ ID NO:232, SEQ ID NO:273 and SEQ ID NO:281 in the Sequence Listing.

7. An isolated nucleic acid capable of hybridizing to the nucleic acid according to any of claims 1 to 4 or a complementary nucleic acid thereof.

8. A diagnostic agent for the detection of a neurological disease containing at least one nucleic acid comprising a portion or the whole of a base sequence set forth in SEQ ID NO:1 to SEQ ID NO:366 in the Sequence Listing.

9. The diagnostic agent for the detection of a neurological disease according to claim 8, wherein the base sequence is any one of the base sequences set forth in SEQ ID NO:121, SEQ ID NO:125, SEQ ID NO:132, SEQ ID NO:133, SEQ ID NO:165, SEQ ID NO:171, SEQ ID NO:187, SEQ ID NO:188, SEQ ID NO:210, SEQ ID 229, SEQ ID NO:232, SEQ ID NO:273 and SEQ ID NO:281 in the Sequence Listing.

10. The diagnostic agent for the detection of a neurological disease according to claim 8, wherein the base sequence is any one of the base sequences set forth in SEQ ID NO:121, SEQ ID NO:125, SEQ ID NO:132, ID NO:165, SEQ ID NO:171, SEQ ID NO:187, SEQ ID NO:188, SEQ ID 229, SEQ ID NO:232, SEQ ID NO:273 and SEQ ID NO:281 in the Sequence Listing.

11. The isolated nucleic acid according to claim 7, wherein the nucleic acid is DNA.

12. A diagnostic kit for the prognosis of human neuroblastoma containing as the effective ingredient, a primer set comprising a pair of the isolated nucleic acids according to claim 11.

13. A method of diagnosing the prognosis of human neuroblastoma, the method comprising detecting the presence or absence of a nucleic acid comprising any one of base sequences set forth in SEQ ID NO:1 to NO:366 in the Sequence Listing from a clinical tissue sample of the neuroblastoma.

The application's sequence listing, which the Patent Office published only in electronic form, follows.

SEQUENCE LISTING (742 sequences)

SEQ ID NO: 1 - DNA, 824 bp, Homo sapiens
  misc_feature (17)..(17): n is a, c, g, or t
  misc_feature (718)..(718): n is a, c, g, or t
  misc_feature (725)..(725): n is a, c, g, or t
  misc_feature (741)..(741): n is a, c, g, or t
  misc_feature (753)..(753): n is a, c, g, or t
  misc_feature (791)..(791): n is a, c, g, or t
  misc_feature (812)..(813): n is a, c, g, or t
  misc_feature (820)..(820): n is a, c, g, or t
  misc_feature (823)..(823): n is a, c, g, or t
  nbla-00015-f
ggatcctcgagcactgngtcgcctactgggatattgacagtgcctcagtgcccagcttagaagagctgaaccagttcaggcaacatgtgacaactttgagggaaacaaaggcttctaggcgtgaggagtttgtcagtataaagagacagatcatactgtgtatggaagaattagaccacaccccagacacaagctttgaaagaggtgtggtgtgtgaagacgaagatgccttttgtttgtctttggagaatattgcaacactacaaaagttgctacggcagctggaaatgcagaaatcacaaaatgaagcagtgtgtgaggggctgcgtactcaaatccgagagctctgggacaggttgcaaatacctgaagaagaaagagaagctgtggccaccattatgtctgggtcaaaggccaaggtccggaaagcgctgcaattagaagtggatcggttggaagaactgaaaatgcaaaacatgaagaaagtgattgaggcaattcgagtggagctggttcagtactgggaccagtgcttttatagccaggaacagagacaagcttttgcccctttctgtgctgaggactacacagaaagtctgctccagctccacgatgctgaagattgtgcggttaaaaaactactatgaagttcacaaggaactccttgaaggtgtccaaaagtgggaagaaacctggaggctttcctaaagtttgaganaaaagcntcaaattcaaatccanttacaaaccganggaggaatcctccaaaagaagaaaacaacgaagccaanctccaaaaaatgctgcccaannctggaanaana

SEQ ID NO: 2 - DNA, 806 bp, Homo sapiens
  misc_feature (11)..(11): n is a, c, g, or t
  misc_feature (103)..(103): n is a, c, g, or t
  misc_feature (160)..(160): n is a, c, g, or t
  misc_feature (257)..(257): n is a, c, g, or t
  misc_feature (279)..(279): n is a, c, g, or t
  misc_feature (282)..(282): n is a, c, g, or t
  misc_feature (542)..(542): n is a, c, g, or t
  misc_feature (552)..(552): n is a, c, g, or t
  misc_feature (590)..(590): n is a, c, g, or t
  misc_feature (601)..(601): n is a, c, g, or t
  misc_feature (682)..(682): n is a, c, g, or t
  misc_feature (735)..(735): n is a, c, g, or t
  misc_feature (747)..(747): n is a, c, g, or t
  misc_feature (778)..(778): n is a, c, g, or t
  misc_feature (791)..(791): n is a, c, g, or t
  misc_feature (804)..(804): n is a, c, g, or t
  misc_feature (806)..(806): n is a, c, g, or t
  nbla-00015-r1
ttttttttgtntttttttttttttgttttttcattatggttctcggtgtactttattctcctgctgtctagctaagcagcccacacaggacagaaatgggtancactgaggaatgatcagattttttttctatccccaatatttctgccccctccctaanccctgacccaaccctatcttaataatcacgaatggttagtacatcattctgtctctcaaagaacaactgaaatggaaacaaggcattagaggaccangcctcttcttaatagggcttanganctggtatgagctctttattcacaatggagcgtctctccttcaaatacctggattttttttttttttgtacactggttcatagatcggcacttggctttgaacctggcaccaaaaggcacaatatctgataccctgtacaagagctattagagatgctgccatatggatgggcaaaactgagccaatcccacttaggaatggaaggcttggacatggaagggaggatataaacgaggagttggagaaaaacgcaagcccantttttgctanagtggaaatgaaagtgggaatgagggtcttgtttttantcctctaaggnccaaggaagcaattttaaaacttccctgggttttctgaaagcagcatattcaaaatgccaacaaaaactcctaacaactgnaaaaccaaaagagggttaaagctcaacaaaatcccttcctaatgctgaaaggntctaaaattcangatgccctgttcccttgtaaagggaaaatanttaatctgatttnatgggaatccaancn

SEQ ID NO: 3 - DNA, 3181 bp, Homo sapiens
  nbla-00018
cctactggtatgatgatctagttgtgtaggaaagaacttggcatgtatggcacagatcagtgactggttaacatgtccattgggctgcctttttcaaatattgggtattttatacaaggttttgatcgatattggaccacattcagaaccctactaaatcatacaaagggttactttatttaagatattttaatgtttggataaaatgagagcaatgtttttagatacttgaactactaagcctgttggtggaaaaataaaaggattagacttctcttctgcacttatatactgttggtaggaacgtaaattagttcagccacaaattggaaagcagtttggagatttctcaaagaacttaaactaccattcaacccagcaatcccattactgaatatgtattcagaagaaaataaattgtcttgccaaaaaatacgtgttcacatgttcattgaagcactatttatgatagcaaagacacagaatcaacctaggtgcccatcaacagtggactggatgaagaaaatgtggtacatatatactatggactaccacacagccatgagaaaggaacaaagtcatgttttttgcagcaacatggatgcagctggaggccattatcccaagcaaattaatgcaggaacaggaaaccaagtactacgtattctcatttactagtgggagctaaatgtggggtactcatggacataaagatgacaacaatagacactggggactactgttgtggcagagttgaaaaactacctattgggtactatgctcacaacctaggtgatgagatctttcgcacaccaaacttcagtgtcatgcaatatacccacgtaacaaacctgcacatatacctcctgaatataaaggttgagattatttttttaaaagaattatgttctgtccaaacctgaggccaacatggcttagcacatgcatgagcaaaacagtatccatggatgagcattatctgggggatttcttttctaaattcaatccaatttagcaatatttatagagcatctactataagctggacctgaaggttcagacttgagttacctactctaccattagtacttgttactaatgtgtgaatacttagtactttattagtccctacactaccaatttgttcaggcaccaaggtgccaaaccatataatacaatttctcccgtaagtccccaaagcatagctgcatctaggctataatgctgaataggacttttctaaaaactcaggaattgatgaaaggagttgaaagcagaaaggcaaagctgaaggataggtcctctgtaacagtgtccccaaagaccacaggctgtgcccccttccttggagttcgtctggtgaccccttctgagcccccggagaccactgtgttgcagagtctatctcatttcccccaagtgggaacccctttaccagatctctcctagccagagtccaggcctcttaaccacctctgggccccagtgaggaaggaaagtctgttttctctacacctgggctatgttacttcagtagccactaacctggggaactagctttgatttaaataaatttttttttattctcaagagcattttaagtgctcaatagctagtggctactgtcttattaaatggcacagatatatcgcatgtccatcatcatagaaagttattttgaatgaagccatgacaccatccatcttaggccttccttcccttcaatgtcataatgatctgaaaatgcaacatttccctcaaggaagatggttagtccctgaccccataggtgagcatcacagcctgtacttccactcacattaggcctcaaatataattttatttatctgctattgtctattttgcacactctatttgctatctaagcccctggaaagttgaggtgccctagtcatcctctgtctctaggttttcctttggtccccaggtgcttaccatgtgcctggctctgtgcaagtgactttaacatgaacttaattctctcagtctttcagaggatgatttgtttttgctgcctgatagccttttttctatttaccttccttgacatattaatagagtcaccaaaatgttcagctgcatttcattcacctagaaggcaatgaatgtaaaaacatcaacaattctgcctgctacgaaataagtgctcagtaaatgtccattcccttctttacttctgcaggtgatatttatagtaataatgattttttaagttataatttattatccagcttctttattaggcattttacacttattgtcataacaatcctatgagggctaaagtaaaaatgtaataaaatatagctctctcccacatcctgtttttcatctcacatgcagattttgaattccccaagaacagacctgtgtcatcttacacattttggaatccctggagtatagcccagtacctggtgctgggagggactcagtatatatttattgaattcaaaaatgaatgaataaatcacttcttggccttcctgtccgccactcctggtcacccagcacctatacaaacctgctttcctctccctagcctatcaaaattcctgttacttcaacttgaatctctcctggtctaggagctgctttccaaactaaactcagctgcgttaagggagatggaaaaattcacaggatactaatagaattttagaccagtgcaccaaacccaatgtcagaggcagaggggcaagtttatttgagcagcaaggagactttgcattcagctctgtagatgaccttggaagacaggcctaggctaactgggctaagcctaggctaaaagtctatcgccaagctttgttcaaaattaagagtgttttaagcagggcctcaggctctgggctgtgaaggccccaagtgaccaccagaagatgctagaaaggacatcagctactggagcatggagaggaggtgagcctggctccagtaagagtgtggcaaactcctgatggttttacaagggtgtagggcttttggagactctactttggtttgtgtagtgatgcatttgcaaacatatgtttaaaatactaacggctctccacattcttagatttcacatccatggttttaaccaaccatggatggaagatatttggggggaaaaaaaaaaaaaaaaaaaaaaaggccacatgtgctcgagctgcag

SEQ ID NO: 4 - DNA, 869 bp, Homo sapiens
  misc_feature (2)..(2): n is a, c, g, or t
  misc_feature (6)..(6): n is a, c, g, or t
  misc_feature (537)..(537): n is a, c, g, or t
  misc_feature (543)..(543): n is a, c, g, or t
  misc_feature (579)..(579): n is a, c, g, or t
  misc_feature (705)..(705): n is a, c, g, or t
  misc_feature (726)..(726): n is a, c, g, or t
  misc_feature (738)..(738): n is a, c, g, or t
  misc_feature (758)..(758): n is a, c, g, or t
  misc_feature (767)..(767): n is a, c, g, or t
  misc_feature (808)..(808): n is a, c, g, or t
  misc_feature (815)..(815): n is a, c, g, or t
  misc_feature (827)..(827): n is a, c, g, or t
  misc_feature (850)..(850): n is a, c, g, or t
  misc_feature (853)..(853): n is a, c, g, or t
  misc_feature (856)..(856): n is a, c, g, or t
  misc_feature (863)..(863): n is a, c, g, or t
  nbla-00059-f
cncgancactgttggcctactggtttttttttttgcggctccacgtcggcaccagctgcggggcaagatggaggcgctgattttggaaccttccctgtatactgtcaaagccatcctgattctggacaatgatggagatcgactttttgccaagtactatgacgacacctaccccagtgtcaaggagcaaaaggcctttgagaagaacattttcaacaagacccatcggactgacagtgaaattgccctcttggaaggcctgacagtggtatacaaaagcagtatagatctctatttctatgtgattggcagctcctatgaaaatgagctgatgcttatggctgttctgaactgtctcttcgactcattgagccagatgctgaggaaaaatgtagaaaagcgagcactgctggagaacatggaggggctgttcttggctgtggatgaaattgtagatggaggggtgatcctagagagtgatccccagcaagtggtacaccgggtggcattaaggggtgaagatgtcccccttacggngcaaancgtgtctcaagtgctgcagtcagccaaagaacagtnaagtggtcacaccttcggtgaagactcactgttcctggctcctcatcctcctcaaaaaattgcatgtccgctgtgaattttcatccaattccccaatcgatgctccaagggtcatctccggggatnacaaggattcttaaatctcantctgtttgtggntgcccctcaacctcccctanaaccttccnatcctttcaatcctcttcaattctgggagtaaagctccaancatattnagtaataggcangggaaacaacctccttcttttanacnggnttaagcncaaatg

SEQ ID NO: 5 - DNA, 906 bp, Homo sapiens
  misc_feature (2)..(3): n is a, c, g, or t
  misc_feature (5)..(10): n is a, c, g, or t
  misc_feature (488)..(488): n is a, c, g, or t
  misc_feature (551)..(551): n is a, c, g, or t
  misc_feature (570)..(570): n is a, c, g, or t
  misc_feature (624)..(624): n is a, c, g, or t
  misc_feature (632)..(632): n is a, c, g, or t
  misc_feature (697)..(697): n is a, c, g, or t
  misc_feature (703)..(703): n is a, c, g, or t
  misc_feature (705)..(705): n is a, c, g, or t
  misc_feature (727)..(727): n is a, c, g, or t
  misc_feature (810)..(810): n is a, c, g, or t
  misc_feature (815)..(815): n is a, c, g, or t
  misc_feature (820)..(820): n is a, c, g, or t
  misc_feature (833)..(833): n is a, c, g, or t
  misc_feature (849)..(850): n is a, c, g, or t
  misc_feature (853)..(853): n is a, c, g, or t
  misc_feature (861)..(861): n is a, c, g, or t
  misc_feature (866)..(866): n is a, c, g, or t
  misc_feature (869)..(869): n is a, c, g, or t
  misc_feature (890)..(890): n is a, c, g, or t
  misc_feature (896)..(896): n is a, c, g, or t
  misc_feature (900)..(900): n is a, c, g, or t
  misc_feature (904)..(904): n is a, c, g, or t
  nbla-00059-r1
gnngnnnnnntgtggctttttttttttttttcagtttggaaaaaatgttttattcctctttgcacagagcagtttatgaaggtgggttttctcctgactccatgcatcttttacacaaagatgcccccttaaatatgcccagttatctgccccacctcagtgctggagaactggcagttagtaagtggggcagaatgcttaagtctcaggaaggtttttaaaggcatttttgtggggaggaagttctgggtcaaggggaaagattagacccaagagtgagtattccattctccatcttcctggggaaatccaaaccccaaaggttttatgaagaaaagcacctctctcagcgacctagagacagggagagcacagacctactgcttgggtgtaaggctgaggcagagagagggtaggttgcagcgactgcagacccacggcagagagtaaatgcatgtcggggagctgaggggacagagacagcctanaggccaagtcataagttccactccttccccagttctgagtagaaactttcttcccaagactanaatggagttttaagtttangaactggctttgcccaaggacacagagaagacaaaccaagcaacgattccacangtagtaangggtggacagttaaggtagctaactaagagatgggcactcgccactgcagttttgaactatatgncaaatnanggtacagatgcattttatatgncctggtcatacaatttaaattgcgttttccatgttgtcccttccctatgaactattccaaaagcctcttccaaggaaaggganagggnaattngaaggaatggganaaaacacggaggcacnnaantggggtanggctnaantggtaaatcctaccatcccgnccaaancgtntatnaa

SEQ ID NO: 6 - DNA, 906 bp, Homo sapiens
  misc_feature (2)..(2): n is a, c, g, or t
  misc_feature (4)..(4): n is a, c, g, or t
  misc_feature (7)..(14): n is a, c, g, or t
  misc_feature (23)..(23): n is a, c, g, or t
  misc_feature (404)..(404): n is a, c, g, or t
  misc_feature (460)..(460): n is a, c, g, or t
  misc_feature (559)..(559): n is a, c, g, or t
  misc_feature (616)..(616): n is a, c, g, or t
  misc_feature (640)..(640): n is a, c, g, or t
  misc_feature (658)..(658): n is a, c, g, or t
  misc_feature (665)..(665): n is a, c, g, or t
  misc_feature (680)..(680): n is a, c, g, or t
  misc_feature (705)..(705): n is a, c, g, or t
  misc_feature (714)..(714): n is a, c, g, or t
  misc_feature (745)..(745): n is a, c, g, or t
  misc_feature (765)..(765): n is a, c, g, or t
  misc_feature (768)..(768): n is a, c, g, or t
  misc_feature (797)..(797): n is a, c, g, or t
  misc_feature (806)..(806): n is a, c, g, or t
  misc_feature (822)..(822): n is a, c, g, or t
  misc_feature (827)..(827): n is a, c, g, or t
  misc_feature (854)..(854): n is a, c, g, or t
  misc_feature (873)..(873): n is a, c, g, or t
  misc_feature (900)..(900): n is a, c, g, or t
  nbla-00072-f
gngnggnnnnnnnnaatctcgancactgttggctactggggtggctagcctgtcctgacaggggagagttaagctcccgttctccaccgtgccggctgggccaggtgggctgagggtgaccgagagacaggacccttgacatctccatctgcacagaggtcctggctggaccgagcagcctcctcctcctaggatgacctcaccctccagctctccagttttcaggttggagacattagatggaggccaagaagatggctctgaggcggacagaggaaagctggattttgggagcgggctgcctcccatggagtcacagttccagggcgaggaccggaaattcgcccctcagataagagtcaacctcaactaccgaaagggaacaggtgccagtcagccggatncaaaccgatttgaccgagatcggctcttcaatgcggtctcccggggtgtccccgangatctggctggacttccagagtacctgagcaagaccaacaagtacctcaccgactcggaatacacagagggctccacaagtaagacgtgcctgatgaangctgtgctgaaccttaaggacggagtcaatgcctgcattctgccactgctgcaaatngacaaggactctggaatcctcaanccctggtaaatgcccaantgcacanatgactattaccganggcacaacgctctgcacatcgccantgagaagangagtctgcaatgtgtgaagctcctggtgganaatgggggcaatgttcaagnccnggcctgcggcgctcctcaaaaagggcaanggacttgcnttaattcggtgagtancctcncctttggcgcttcacaagcatgggatntggaactactcctgggaancaaacaaccgcaaccttgaagcactgntcccag

SEQ ID NO: 7 - DNA, 891 bp, Homo sapiens
  misc_feature (17)..(17): n is a, c, g, or t
  misc_feature (19)..(19): n is a, c, g, or t
  misc_feature (501)..(501): n is a, c, g, or t
  misc_feature (525)..(525): n is a, c, g, or t
  misc_feature (562)..(562): n is a, c, g, or t
  misc_feature (596)..(596): n is a, c, g, or t
  misc_feature (642)..(642): n is a, c, g, or t
  misc_feature (678)..(678): n is a, c, g, or t
  misc_feature (718)..(718): n is a, c, g, or t
  misc_feature (730)..(730): n is a, c, g, or t
  misc_feature (733)..(733): n is a, c, g, or t
  misc_feature (738)..(738): n is a, c, g, or t
  misc_feature (757)..(757): n is a, c, g, or t
  misc_feature (779)..(779): n is a, c, g, or t
  misc_feature (784)..(784): n is a, c, g, or t
  misc_feature (787)..(787): n is a, c, g, or t
  misc_feature (796)..(797): n is a, c, g, or t
  misc_feature (802)..(802): n is a, c, g, or t
  misc_feature (805)..(806): n is a, c, g, or t
  misc_feature (810)..(810): n is a, c, g, or t
  misc_feature (818)..(818): n is a, c, g, or t
  misc_feature (822)..(822): n is a, c, g, or t
  misc_feature (837)..(837): n is a, c, g, or t
  misc_feature (846)..(846): n is a, c, g, or t
  misc_feature (858)..(858): n is a, c, g, or t
  misc_feature (862)..(862): n is a, c, g, or t
  misc_feature (868)..(868): n is a, c, g, or t
  misc_feature (883)..(884): n is a, c, g, or t
  misc_feature (886)..(887): n is a, c, g, or t
  misc_feature (890)..(890): n is a, c, g, or t
  nbla-00072-r1
tgtggcttttttttttntnttttagttagtgaaaatatatatttgccaccagaattcactgggaccccagagccagcagatgtggttggaaagatcctctgctctgtcctctggcctcctgctgcatctgggccatcagttggactggaggagctggacgggcacatagttttcctcagaggcaccatcctcatcctccttgggaggggaagccaggacagggttctcgagagttcgagggacacctgcccctgacgggtcctcacacagcgtaggcagcgtctgctcccatgaagcccagttcacctcctccaccctgaagcaccagcgctcatcggggctgccatctggcttagtgccaacggtcagcatcacacctgcccgctgcttcttcctgcaccaccaatagccattctccatctccaggacagagatggctttctgcagcttccagatgctccagctgtcagtggcgacactgttgacggtctcgctcatganggcgatgagcatgttgagcaacangatgtaggtgagcagcacgtaggccaacaagcaacancaccatgccgcggaagtgcaactgctcctggaanggcaactcgcccatgccgatggtgaatttgaagaactccaaggagnttccaggataccctgtactgggcccgtttgccctcntcctcctgtccctccatgggctgcactgactccgttgcantggggcctgtangancttcngggcgccaaacctcctggntcaagctcaacaagggctacancgaanccnaaaagggannctaanttnnttanaaggaacncaanaaggtccccaggatnaccttcggnttatgaaacgtnaatncctgtnttctgggaaccactnntnnatna

SEQ ID NO: 8 - DNA, 3381 bp, Homo sapiens
  nbla-00086
gcctactggtcgacgtgtggcgtcggctctacccggaatggagaatatccaggagaaaagcaaagaagggatgatcgacatcaagctgggcaaaccccaggagcccccggccagcgagggcggctgctcctgctaatgcagagccgacctgtggcttcccatgacactccttgcttgttgtgttgcttcctattggctagcttcctaaggggggagggaaccgagttatcaagatgggaggatttttcttttctctctgtctttaggagtagggtgggatggggagggaggctgggcatcagggatcacatcactcttaacggctgttacttaaacaactattttttggtttggttgtaatatattgtactttattaagattgccaaaaactgttaaaatttaaaaaaaatttaaatcatgtgtatacaattttttgccagataaaaatgtagtcatttttatttgaaagatgtgctttttgtttttgtatatttgtaaacttatagagaaccttttccacacacctcctccttcctgttctctttgaaccgttcatcacctctgccttcctcctatccccagcccaataaattaaaacaattaactgagcaaattaattaggcttcagtctggggccatctggccccactctctaggccctactccagttaaatcaaacattggttgaacacatcagcctctgaaaaggtagctctgactcttgtctttccatggccagagtgggtcgtcaacctcgtgtggagctgagaccaaggtctgtgggctctaggcagcccggcagcagcccccagaggaactgctcccacctctccttctctttccctgaaaagccttgaagggggttgagggtacaggcaaccttgtgttctctgtgccctcagggactggcagagcaagaggccatcagaaggacgaggtgctgttggcaattgcagctgcgtggtgcgtggtttatagactggggtgccatgtgtacttctgaaaatattttaaccagcccacccagcagtcagtacacatgcctgggccaagtctaagaaactcagtgtgtgatgttgggcagtgtgccatcctgaagccttcctcctggatgtcagggaagctggaccacctggagttgatcctctgtgatggggaggcgggggggggggggtgttgtctgcagaaccaccaccttgaaagatccatgttcttagagcctcagctgctaatattgttgagtgctttctggaaaagctgatttgttgctatgttttcaccccagtggcatggcgcagttgaagtctttgtggacatatctttgtggctactgtggctgcgctgtggtcacctgaggatgtggttcaggtggggtctccagaaggctgcttgcccccagagagccatctcttccatttttgattcattcctgagaatggcttagtcctgagaatctgcaaagtctctgaagagaactctctcttcccactaagtgatataacctacttggccagcattccaaatagactcagactcactgccctgagcctgcacagagccaggtgcaatgggcagtgagtctggccaaaatgtaaaccccaccctccctgctgtcattggctctccctccaggctgctgctgggcatgtcatagatgggatgaatgaccatctggggtatggtgggctgaactccacaaggtcgttggaatgaattttgaaacttctcagaaattaatctgaaatggcaggcagtaagtgcagcagaatctggcaggactgatatttgtgcagtgggcctgccacacaccctctgcctaggaggctgtatgccagagctcatctctagcaaggaatttatcttcaggtgaagaagagaggaagcaggatcccactgagcacctcttgcagaaggcaaggaccaatgtttgaacgtgtttcagatgtcatgtgtttagtttttatatgtgtgtacataattatatatagagatagacttgtgtatacaccttccacaaacacatcctcacggagatacatgtgctcaatgtatattcttgtttctcctgctctcaagttggaacttgcattgtgataagttttggaaattcaaaagtactgcaacgtgttgaaataagaaatacttaatattgtcaaataacttgtgattgtcttgccatcaataaaataatgcatagttgtgttaaactacaggcaaacatagcccacgggaatatctccaccatttctctatgtactttatatgcacgggtgtgcatgcctgtgtgggccagtgtccccccaccatgggcacacccccaagtggtgcttgttggaagagtgcttacttacctcgagagaatttacaggagtccacatgacagtgtcctgcctggttggcagcgggggccatcacctgtggcctctgagaccgccccatttacaggaatctgcactgggtctcagtgaatgaacgtatggtagatttttattttcttggcactaaagattagcttttttaaaaaaacatcccataaaacagtagaaactcagttcccttctcaggggcacacacatccaaggcagccagacctctttttcagaagttgttggttccctgatttttgtcttgagcaggcaccatccctgtccccttgcttgcaggtagaattggcacagagtgaagtttccatttttcatccattgctgccctgtgtgtgaacaaatgtgactccatatttattacacagcaaggactgctgtgtgagggtgtgttcctcagaccatctctactctttttggttaggacactaggttcttcccagcatatgagtgagaatattggtggtattttgggctcctctactgcacaagggccagtccccaagtctactctgattgattgtcatgggcacccacacagatcaggacaccctttgaatttttgtttgacatgaactatttaggtgttccaaaaccttgggatctcaatgtgcaaactccttggactccagacccctgtctggttggcactcccagcagtgtgtggtttcatcaggaaatccttgcagcaggggtttagatggttccttcaggaggtgggaagcctccatagcattgaaggccagcctgcatctcgcggtgtgtgtccacttctcccctcactttcccctcacccatccctttaaagtgattggctgtgaggagcacagagggtggcaattccatctgttatgggctcagaagacatagccgccatgttgatttcacattaaactgtgtaaaatgtggaaaagactcagcatgttggtcaaacaataaactgtcctaattctcaaaaaaaaaaaaaaaaaaaaaaaaaaaaaggccacatgtgctcga

SEQ ID NO: 9 - DNA, 866 bp, Homo sapiens
  misc_feature (14)..(14): n is a, c, g, or t
  misc_feature (561)..(561): n is a, c, g, or t
  misc_feature (636)..(636): n is a, c, g, or t
  misc_feature (684)..(684): n is a, c, g, or t
  misc_feature (694)..(694): n is a, c, g, or t
  misc_feature (702)..(702): n is a, c, g, or t
  misc_feature (729)..(729): n is a, c, g, or t
  misc_feature (746)..(746): n is a, c, g, or t
  misc_feature (771)..(771): n is a, c, g, or t
  misc_feature (785)..(785): n is a, c, g, or t
  misc_feature (805)..(805): n is a, c, g, or t
  misc_feature (808)..(808): n is a, c, g, or t
  misc_feature (833)..(833): n is a, c, g, or t
  misc_feature (837)..(837): n is a, c, g, or t
  misc_feature (840)..(840): n is a, c, g, or t
  misc_feature (851)..(851): n is a, c, g, or t
  misc_feature (858)..(858): n is a, c, g, or t
  misc_feature (863)..(863): n is a, c, g, or t
  misc_feature (865)..(865): n is a, c, g, or t
  nbla-00110-f
tctcgagcactgtngggcctactgggctcattttctcttgctgccgccatgattctgaggcctccccagccatgtggaactgcaatactttaaagacacaaagtctcaacaaccatcttccgcttgacgagacagatcattctaatttgagcagaagctactatgtcctgccctttgaacgcggcggcccggacagctgacaaggacacactgtgtatttccattccaattctgggagtgctctgaggcctctgggggagaaggacccatgaaatattcaaaacataagtgaataaaatatctaggtgctagatatgggccaggaagagccctcggccctgcaaagtgtgtgtgatggtgagaagctaccggaagagatggtccctgtgcttggttcattccttggacatttatcaagctgacgaatgtagcagaggtgcttcagtcggctgtaattccacgggtggagtgctggctggagagttacctggggctgtcacactgcatgggctccgggacactgtggctgcccttatgtggtgtccccggagggccctgcangtgtcacaccgctgctccacactgccacctgctgtcaacatctgtgcaacgtatccaagtctctgggggctaaantgaaaaacatgcatctcgtaaccaatgaaatccgggcttgtcctgaanactcctgcantcatccantccacactgctataaagacatactaanactgggcacttcatggnaaaaaaaggtttggttggtcacggntctgaaggctttanaggaaccgtggaactttcanttntggggaagcctcaaggaacttttancaanggnggaaggtgaanggggganaaggntnt

SEQ ID NO: 10 - DNA, 888 bp, Homo sapiens
  misc_feature (7)..(8): n is a, c, g, or t
  misc_feature (401)..(401): n is a, c, g, or t
  misc_feature (485)..(485): n is a, c, g, or t
  misc_feature (490)..(490): n is a, c, g, or t
  misc_feature (640)..(640): n is a, c, g, or t
  misc_feature (702)..(702): n is a, c, g, or t
  misc_feature (717)..(717): n is a, c, g, or t
  misc_feature (725)..(725): n is a, c, g, or t
  misc_feature (750)..(750): n is a, c, g, or t
  misc_feature (790)..(790): n is a, c, g, or t
  misc_feature (792)..(792): n is a, c, g, or t
  misc_feature (795)..(796): n is a, c, g, or t
  misc_feature (810)..(810): n is a, c, g, or t
  misc_feature (876)..(877): n is a, c, g, or t
  misc_feature (887)..(887): n is a, c, g, or t
  nbla-00110-r1
tgaaggnngttcactgccacacaacatctgcatcagagacaaaagtaacggggctcgaggcgggactgggctggctctgcccagtgcaccatataacagcacggacaaaactacacaaatcccagctgggtacagtggctcacgcctgttttcccagcattgttcgaggctgcggtgggaggatcacttgaggtcaggagttcgagacctgcctggccaacatggtgaaaccccatctccactaaaaatacaaaaattagcagggcatggtggcacgtgcctgtgatcccagctactcgggaggttgggtgatttataaagaaaagaggtctatttggcacacagttctgcaggctgtacaagaagcacggtgccagcatctgcttctggtgaggcctcangaagtgtccactcatggcagaaggcgatgggagcaagtgcatgcagaccatatggtgagagagggaacaagagagagtgggcanaggangtgccaagcgtttttaacaatcagttcttgtgagaaggaataaagcatgaatgcattcatgaccgcgaggacagcaccaagctctcatgtcctaagcaccttctgtcaagtcccacctccaacattggggttcaaatttcaacatgaggntggaagtgggacctggtgggaaaggattggatcatggtggtggtccctcacaagtgggttancgccaacttcttggngctgttcncatgataatgagttaccgttaaatntgggtgttcaaaatgtcgggaccccctccttttctccccncnacnntcccatttaaaacncctttccgccttcaacttccaacatgactataatttcctgaggcctcccaaaaattgaaactgcannctccttaaanc

SEQ ID NO: 11 - DNA, 850 bp, Homo sapiens
  misc_feature (2)..(3): n is a, c, g, or t
  misc_feature (5)..(20): n is a, c, g, or t
  misc_feature (31)..(31): n is a, c, g, or t
  misc_feature (40)..(40): n is a, c, g, or t
  misc_feature (600)..(600): n is a, c, g, or t
  misc_feature (621)..(621): n is a, c, g, or t
  misc_feature (650)..(650): n is a, c, g, or t
  misc_feature (660)..(660): n is a, c, g, or t
  misc_feature (674)..(674): n is a, c, g, or t
  misc_feature (681)..(681): n is a, c, g, or t
  misc_feature (733)..(733): n is a, c, g, or t
  misc_feature (742)..(742): n is a, c, g, or t
  misc_feature (745)..(745): n is a, c, g, or t
  misc_feature (747)..(747): n is a, c, g, or t
  misc_feature (750)..(750): n is a, c, g, or t
  misc_feature (753)..(753): n is a, c, g, or t
  misc_feature (755)..(755): n is a, c, g, or t
  misc_feature (761)..(761): n is a, c, g, or t
  misc_feature (779)..(779): n is a, c, g, or t
  misc_feature (804)..(804): n is a, c, g, or t
  misc_feature (811)..(811): n is a, c, g, or t
  misc_feature (817)..(817): n is a, c, g, or t
  misc_feature (819)..(819): n is a, c, g, or t
  misc_feature (823)..(823): n is a, c, g, or t
  misc_feature (837)..(838): n is a, c, g, or t
  misc_feature (845)..(845): n is a, c, g, or t
  misc_feature (850)..(850): n is a, c, g, or t
  nbla-00132-f
gnngnnnnnnnnnnnnnnnnggattctcgtngcactgtgncgcctactggtaagataccaaggaggagtgagagcgtccctgccttcgaggagcagacagggcaccgcgaggcgtttgcctcagcatggagggcggggccgcggcagccacccccacagcactgccttactacgtggccttctcccagctgctgggcctgaccttggtggccatgaccggcgcgtggctcgggctgtaccgaggcggcattgcctgggagagcgacctgcagttcaacgcgcaccccctctgcatggtcataggcctgatcttcctgcagggaaatgccctgctggtttaccgtgtcttcaggaacgaagctaaacgcaccaccaaggtcctgcacgggctgctgcacatctttgcgctcgtcatcgccctggttggtgagttcccgggcgcggccttccccgccacctgcctgcctcttcaggcttggtggcggtgttcgactaccacaggaagaagggctacgctgacctgtacagcctacacagctggtgcgggattcttgtctttgtcctgtactttgtgcaattggctggtgggcttcagcttcntcctgttccccggagcttcantctccctgcggagccgctaccgcccacancacatcttcnttggtgctacatcntcctccnttccgttggcaacgccctgctgggcctgaaggaggaatgctgttcaacctcnggggcaatntancncanttnanccccanggtgtcctggccaaagtnctgggcctgctgctggcctgcttcngtggggnggtgcncnaaancttgacccgggccnnctggaancggcn

SEQ ID NO: 12 - DNA, 860 bp, Homo sapiens
  misc_feature (5)..(10): n is a, c, g, or t
  misc_feature (43)..(43): n is a, c, g, or t
  misc_feature (363)..(363): n is a, c, g, or t
  misc_feature (545)..(545): n is a, c, g, or t
  misc_feature (554)..(554): n is a, c, g, or t
  misc_feature (624)..(624): n is a, c, g, or t
  misc_feature (638)..(638): n is a, c, g, or t
  misc_feature (681)..(681): n is a, c, g, or t
  misc_feature (688)..(688): n is a, c, g, or t
  misc_feature (709)..(709): n is a, c, g, or t
  misc_feature (725)..(725): n is a, c, g, or t
  misc_feature (728)..(728): n is a, c, g, or t
  misc_feature (731)..(731): n is a, c, g, or t
  misc_feature (736)..(736): n is a, c, g, or t
  misc_feature (792)..(792): n is a, c, g, or t
  misc_feature (797)..(797): n is a, c, g, or t
  misc_feature (809)..(809): n is a, c, g, or t
  misc_feature (812)..(812): n is a, c, g, or t
  misc_feature (816)..(816): n is a, c, g, or t
  misc_feature (834)..(834): n is a, c, g, or t
  misc_feature (836)..(836): n is a, c, g, or t
  misc_feature (847)..(847): n is a, c, g, or t
  misc_feature (853)..(853): n is a, c, g, or t
  misc_feature (855)..(855): n is a, c, g, or t
  nbla-00132-r1
ggtgnnnnnntgtgggccgtttttttgccttttttttttttcngctgtagacatttattgaatcatctgttgcaccaacagcacattgtatttcacagaagattggccacaggcaaaataaaataacccaccacaaatccgcttctgggggccttcttcagctccttagtcatccagtgttcactttggcaaacagaccagtttacagacttttgttgcaaatctaaggttccatttctctctgtagcattccggctagagagagacacgattgtactttggtagtttgtctaaggcggagttttcccacatgtaaacatttcactatacaagtgtgtgccagctgattgaagaactgacggnacccctacccctgaagagtgtacagtctaaacaggaggcgaacactgtcatccggacaggctgagaggagcagcctgggaggaggcccgcctgcatctgccaagagaaagtctgtctgaagtcatgggcttctatcccctctcccaacaaagccatcctaaggctaaagggttaaagaagangaaagtcangactacagctgggccacagcctcatctcaaaagcttcccaaggggcaatccctcccctctcctggggaancttgctttcaccancaacatactttacacatcatatcacttgctcctctggcaaaanggcgggnccaatttgtgccacgtgttantcaagctggagggacnccntgnttgantcaacaaccatcgtgggctttcaagcctgtccctgagggcccccaatttccctggncttgnccaagcatctgntgncaanaagggtggggcctccccncngcttcttaaanattggngnccgcg

SEQ ID NO: 13 - DNA, 3730 bp, Homo sapiens
  nbla-00170
cggaagtgttacttctgctctaaaagctgcggaattcctcgagcactgttggcctactgggagacctctagaaaaagaggctgtaggccaacttaagcctacaggaaaagaggacacacagacattgcaatccctgcaaaaggagaatcaagaactaatgaaatctcttgaaggtaatctagagacatttttatttccaggaacggaaaatcaagaattagtaagttctctgcaagagaacttagagtcattgacagctctggaaaaggagaatcaagagccactgagatctccagaagtaggggatgaggaggcactgagacctctgacaaaggagaatcaggaacccctgaggtctcttgaagatgagaacaaagaggcctttagatctctagaaaaagagaaccaggagccactgaagactctagaagaagaggaccagagtattgtgagacctctagaaacagagaatcacaaatcactgaggtctttagaagaacaggaccaagagacattgagaactcttgaaaaagagactcaacagcgacggaggtctctaggggaacaggatcagatgacattaagacccccagaaaaagtggatctagaaccactgaagtctcttgaccaggagatagctagacctcttgaaaatgagaatcaagagttcttaaagtcactcaaagaagagagcatagaggcagtaaaatctttagaaacagagatcctagaatcactgaagtctgcgggacaagagaacctggaaacactgaaatctccagaaactcaagcaccactgtggactccagaagaaataaatcagggggcaatgaatcctctagaaaaggaaattcaagaaccactggagtctgtggaagtgaaccaagagacattcagactcctggaagaggagaatcaggaatcattgagatctctgggagcatggaacctggagaatttgagatctccagaggaggtagacaaggaaagtcaaaggaatctggaagaggaagagaacctgggaaagggagagtaccaagagtcactgaggtctctggaggaggagggacaggagctgccgcagtctgcagatgtgcagaggtgggaagatacggtggagaaggaccaggaactggctcaggaaagcccccctgggatggctggagtggaaaatgaggatgaggcagagctgaatctgagggagcaggatggcttcactgggaaggaggaggtggtagagcagggagagctgaatgccacagaggaggtctggatcccaggcgaggggcacccagagagccctgagcccaaagagcagagaggcctggttgagggagccagtgtgaagggaggggctgagggcctccaggaccctgaagggcaatcacaacaggtgggggccccaggcctccaggctccccaggggctgccagaggcgatagagcccctggtggaagatgatgtggccccagggggtgaccaagcctccccagaggtcatgttggggtcagagcctgccatgggtgagtctgctgcgggagctgagccaggcccggggcagggggtgggagggctgggggacccaggccatctgaccagggaagaggtgatggaaccacccctggaagaggagagtttggaggcaaagagggttcagggcttggaagggcctagaaaggacctagaggaggcaggtggtctggggacagagttctccgagctgcctgggaagagcagagacccttgggagcctcccagggagggtagggaggagtcagaggctgaggcccccaggggagcagaggaggcgttccctgctgagaccctgggccacactggaagtgatgccccttcaccttggcctctggggtcagaggaagctgaggaggatgtaccaccagtgctggtctcccccagcccaacgtacaccccgatcctggaagatgcccctgggcctcagcctcaggctgaagggagtcaggaggctagctggggggtgcaggggagggctgaagccctggggaaagtagagagcgagcaggaggagttgggttctggggagatccccgagggcccccaggaggaaggggaggagagcagagaagagagcgaggaggatgagctcggggagacccttccagactccactcccctgggcttctacctcaggtcccccacctcccccaggtgggaccccactggagagcagaggccaccccctcaaggggagactggaaaggagggctgggatcctgctgtcctggcttccgagggccttgaggccccaccctcagaaaaggaggagggggaggagggagaagaggagtgtggccgtgactctgacctgtcagaagaatttgaggacctggggactgaggcaccttttcttcctggggtccctggggaggtggcagaacctctgggccaggtgccccagctgctactggatcctgcagcctgggatcgagatggggagtccgatgggtttgcagatgaggaagaaagtggggaggagggagaggaggatcaggaggaggggagggagccaggggctgggcggtgggggccagggtcttctgttggcagcctccaggccctgagtagctcccagagaggggaattcctggagtctgattctgtgagtgtcagtgtcccctgggatgacaacttgaggggtgcagtggctggtgcccccaagactgccctggaaacggagtcccaggacagtgctgagccttctggctcagaggaagagtctgaccctgtttccttggagagggaggacaaagtccctggccctctagagatccccagtgggatggaggatgcaggcccaggggcagacatcattggtgttaatggccagggtcccaacatggaggggaagtcacagcatgtgaatgggggagtgatgaacgggctggagcagtctgaggaagtggggcaaggaatgccgctagtctctgagggagaccgagggagcccctttcaggaggaggaggggagtgctctgaagacctcttgggcaggggctcctgttcacctgggccagggtcagttcctgaagttcactcagagggaaggagatagagagtcctggtcctcaggggaggactaggaaaagaccatctgcccggcactggggacttaggggtgcggggaggggaaggacgcctccaagcccgctccctgctcaggagcagcactcttaacttacgatctcttgacatatggtttctggctgagaggcctggcccgctaaggtgaaaaggggtgtggcaaaggagcctactccaagaatggaggctgtaggaatataacctcccaccctgcaaagggaatctcttgcctgctccatctcataggctaagtcagctgaatcccgatagtactaggtccccttccctccgcatcccgtcagctggaaaaggcctgtggcccagaggcttctccaaagggagggtgacatgctggcttttgtgcccaagctcaccagccctgcgccacctcactgcagtagtgcaccatctcactgcagtagcacgccctcctgggccgtctggcctgtggctaatggaggtgacggcactcccatgtgctgactccccccatccctgccacgctgtggccctgcctggctagtccctgcctgaataaagtaatgcctccgcttcaaaaaaaaaaaaaaaaaaaaaaaaaaaaaaaaaggccacatgtgctcgagctgcag

SEQ ID NO: 14 - DNA, 899 bp, Homo sapiens
  misc_feature (3)..(4): n is a, c, g, or t
  misc_feature (6)..(13): n is a, c, g, or t
  misc_feature (15)..(19): n is a, c, g, or t
  misc_feature (23)..(26): n is a, c, g, or t
  misc_feature (33)..(34): n is a, c, g, or t
  misc_feature (43)..(43): n is a, c, g, or t
  misc_feature (45)..(45): n is a, c, g, or t
  misc_feature (703)..(703): n is a, c, g, or t
  misc_feature (845)..(845): n is a, c, g, or t
  misc_feature (851)..(851): n is a, c, g, or t
  misc_feature (856)..(856): n is a, c, g, or t
  misc_feature (881)..(881): n is a, c, g, or t
  misc_feature (884)..(884): n is a, c, g, or t
  misc_feature (887)..(887): n is a, c, g, or t
  misc_feature (895)..(895): n is a, c, g, or t
  nbla-00185-f
ggnngnnnnnnnngnnnnntttnnnngggcccnnaatcctcgngnacgtggccctactgggcacaaatgtacaatactgtttgggaatatgggaagacctgggatttagaatatgccaagacagatataaattgtggcacagacttgatgttttatatagaaatggacccaccagcactgcctcctaaaccaccaaaacctactactgtagccaacaacggtatgaataacaatatgtccttacaagatgctgaatggtactggggagatatctcgagggaagaagtgaatgaaaaacttcgagatacagcagacgggacctttttggtacgagatgcgtctactaaaatgcatggtgattatactcttacactaaggaaagggggaaataacaaattaatcaaaatatttcatcgagatgggaaatatggcttctctgacccattaaccttcagttctgtggttgaattaataaaccactaccggaatgaatctctagctcagtataatcccaaattggatgtgaaattactttatccagtatccaaataccaacaggatcaagttgtcaaagaagataatattgaagctgtagggaaaaaattacatgaatataacactcagtttcaagaaaaaagtcgagaatatgatagattatatgaagaatatacccgcacatcccaggaaatccaaatgaaaaggncaactattgaagcattaatgaaaccataaaaatatttgaagaacaatgccagacccaagagcggtacaacaaagaatcattgaaaagtttaacgtgaaggcaatgagaaaagaattcaaaggattatcctaattatgataantttaantcccnaatccattgaaattattgccatttnaanaanattggganaaga

SEQ ID NO: 15 - DNA, 887 bp, Homo sapiens
  misc_feature (1)..(1): n is a, c, g, or t
  misc_feature (12)..(12): n is a, c, g, or t
  misc_feature (17)..(17): n is a, c, g, or t
  misc_feature (24)..(25): n is a, c, g, or t
  misc_feature (30)..(30): n is a, c, g, or t
  misc_feature (45)..(45): n is a, c, g, or t
  misc_feature (52)..(52): n is a, c, g, or t
  misc_feature (60)..(60): n is a, c, g, or t
  misc_feature (62)..(62): n is a, c, g, or t
  misc_feature (82)..(82): n is a, c, g, or t
  misc_feature (84)..(84): n is a, c, g, or t
  misc_feature (86)..(86): n is a, c, g, or t
  misc_feature (98)..(98): n is a, c, g, or t
  misc_feature (100)..(100): n is a, c, g, or t
  misc_feature (105)..(105): n is a, c, g, or t
  misc_feature (107)..(107): n is a, c, g, or t
  misc_feature (122)..(122): n is a, c, g, or t
  misc_feature (126)..(126): n is a, c, g, or t
  misc_feature (128)..(128): n is a, c, g, or t
  misc_feature (134)..(134): n is a, c, g, or t
  misc_feature (136)..(136): n is a, c, g, or t
  misc_feature (140)..(140): n is a, c, g, or t
  misc_feature (148)..(148): n is a, c, g, or t
  misc_feature (154)..(154): n is a, c, g, or t
  misc_feature (156)..(156): n is a, c, g, or t
  misc_feature (159)..(159): n is a, c, g, or t
  misc_feature (169)..(169): n is a, c, g, or t
  misc_feature (183)..(183): n is a, c, g, or t
  misc_feature (190)..(190): n is a, c, g, or t
  misc_feature (194)..(194): n is a, c, g, or t
  misc_feature (227)..(227): n is a, c, g, or t
  misc_feature (232)..(232): n is a, c, g, or t
  misc_feature (234)..(234): n is a, c, g, or t
  misc_feature (238)..(238): n is a, c, g, or t
  misc_feature (247)..(247): n is a, c, g, or t
  misc_feature (253)..(253): n is a, c, g, or t
  misc_feature (267)..(267): n is a, c, g, or t
  misc_feature (285)..(285): n is a, c, g, or t
  misc_feature (291)..(291): n is a, c, g, or t
  misc_feature (303)..(303): n is a, c, g, or t
  misc_feature (309)..(309): n is a, c, g, or t
  misc_feature (311)..(311): n is a, c, g, or t
  misc_feature (334)..(334): n is a, c, g, or t
  misc_feature (337)..(338): n is a, c, g, or t
  misc_feature (340)..(340): n is a, c, g, or t
  misc_feature (348)..(348): n is a, c, g, or t
  misc_feature (351)..(351): n is a, c, g, or t
  misc_feature (357)..(357): n is a, c, g, or t
  misc_feature (366)..(366): n is a, c, g, or t
  misc_feature (370)..(370): n is a, c, g, or t
  misc_feature (399)..(399): n is a, c, g, or t
  misc_feature (423)..(423): n is a, c, g, or t
  misc_feature (428)..(428): n is a, c, g, or t
  misc_feature (456)..(456): n is a, c, g, or t
  misc_feature (484)..(484): n is a, c, g, or t
  misc_feature (499)..(501): n is a, c, g, or t
  misc_feature (504)..(504): n is a, c, g, or t
  misc_feature (518)..(518): n is a, c, g, or t
  misc_feature (535)..(535): n is a, c, g, or t
  misc_feature (546)..(546): n is a, c, g, or t
  misc_feature (562)..(562): n is a, c, g, or t
  misc_feature (571)..(571): n is a, c, g, or t
  misc_feature (581)..(581): n is a, c, g, or t
  misc_feature (585)..(586): n is a, c, g, or t
  misc_feature (588)..(588): n is a, c, g, or t
  misc_feature (600)..(600): n is a, c, g, or t
  misc_feature (602)..(602): n is a, c, g, or t
  misc_feature (604)..(604): n is a, c, g, or t
  misc_feature (612)..(612): n is a, c, g, or t
  misc_feature (622)..(622): n is a, c, g, or t
  misc_feature (625)..(625): n is a, c, g, or t
  misc_feature (627)..(627): n is a, c, g, or t
  misc_feature (642)..(642): n is a, c, g, or t
  misc_feature (667)..(667): n is a, c, g, or t
  misc_feature (684)..(684): n is a, c, g, or t
  misc_feature (686)..(687): n is a, c, g, or t
  misc_feature (691)..(691): n is a, c, g, or t
  misc_feature (695)..(696): n is a, c, g, or t
  misc_feature (698)..(698): n is a, c, g, or t
  misc_feature (705)..(705): n is a, c, g, or t
  misc_feature (720)..(720): n is a, c, g, or t
  misc_feature (730)..(730): n is a, c, g, or t
  misc_feature (733)..(733): n is a, c, g, or t
  misc_feature (741)..(741): n is a, c, g, or t
  misc_feature (747)..(747): n is a, c, g, or t
  misc_feature (749)..(749): n is a, c, g, or t
  misc_feature (751)..(751): n is a, c, g, or t
  misc_feature (756)..(756): n is a, c, g, or t
  misc_feature (759)..(759): n is a, c, g, or t
  misc_feature (763)..(764): n is a, c, g, or t
  misc_feature (770)..(770): n is a, c, g, or t
  misc_feature (774)..(774): n is a, c, g, or t
  misc_feature (794)..(794): n is a, c, g, or t
  misc_feature (800)..(800): n is a, c, g, or t
  misc_feature (803)..(803): n is a, c, g, or t
  misc_feature (822)..(822): n is a, c, g, or t
  misc_feature (832)..(833): n is a, c, g, or t
  misc_feature (857)..(857): n is a, c, g, or t
  misc_feature (879)..(879): n is a, c, g, or t
  nbla-00185-r1
nggggttttgtnggctnttcctcnnttgtnctcgttttggttttngggcctnggggcccntnttttgtttaaaaatgctcgntntntttttttttgtntnttttntngttttgtggtccccncttntnttgttntnttantttttttnttgtcntnttntttttttttntttttttttttttnttgtttngtgngtttggggggtttttgggggttttttttttttnttttntntttntattttgtntttttnttttgttttttttntttttcttttgttttttntttgtntttttttttttngttttntntttttttttctgttttttctttntgnngngtttgttnttntttttntcttttttntttngttgtgtgtcttttttttttgtttatttnttttttttttttgttttttttttnttttnttttttttttttttgattttgttttttnttattttgttgtttttttttttttgttnttttttttttctgtnnnttnttttttttttctgnttttctctttttttgtnttgttttgttnttttttttgttttttnttttttttntttttttttntttnntntctttttttttntntnttcttttntttttttctnttntnttgttttttgttttntttttgttcttgttttgtttttttntttttgttgtttttttntnntttntctnntnttttttnttctgtgttggtttnttttttgttngtnatttcttntttgtntntnttttnttntttnntttgtntttncttttttttttttatgtttntcggtnttntttcttttttctttttgtntgtttttttnntgtcgttctttttttttttttgtntttcgtttttttctttcgattntctttttt

SEQ ID NO: 16 - DNA, 864 bp, Homo sapiens
  misc_feature (1)..(1): n is a, c, g, or t
  misc_feature (7)..(11): n is a, c, g, or t
  misc_feature (18)..(19): n is a, c, g, or t
  misc_feature (23)..(23): n is a, c, g, or t
  misc_feature (30)..(30): n is a, c, g, or t
  misc_feature (54)..(54): n is a, c, g, or t
  misc_feature (606)..(606): n is a, c, g, or t
  misc_feature (618)..(618): n is a, c, g, or t
  misc_feature (638)..(638): n is a, c, g, or t
  misc_feature (662)..(662): n is a, c, g, or t
  misc_feature (677)..(677): n is a, c, g, or t
  misc_feature (680)..(680): n is a, c, g, or t
  misc_feature (703)..(703): n is a, c, g, or t
  misc_feature (707)..(707): n is a, c, g, or t
  misc_feature (710)..(710): n is a, c, g, or t
  misc_feature (740)..(740): n is a, c, g, or t
  misc_feature (744)..(744): n is a, c, g, or t
  misc_feature (746)..(746): n is a, c, g, or t
  misc_feature (764)..(764): n is a, c, g, or t
  misc_feature (769)..(769): n is a, c, g, or t
  misc_feature (780)..(781): n is a, c, g, or t
  misc_feature (807)..(808): n is a, c, g, or t
  misc_feature (827)..(827): n is a, c, g, or t
  misc_feature (832)..(832): n is a, c, g, or t
  misc_feature (841)..(842): n is a, c, g, or t
  misc_feature (850)..(850): n is a, c, g, or t
  misc_feature (853)..(853): n is a, c, g, or t
  misc_feature (864)..(864): n is a, c, g, or t
  nbla-00226-f
ngagttnnnnngggcccnngggntctcttncacggggcccctactggggaaagnaactttacagggtcgctagctagtaggagggctttatggagcagaaaaacgacaaagcgagaaaaattattttccactccagaaattaatgatcatgagctcgtttttgatggactctaactacatcgatccgaaatttcctccatgcgaagaatattcgcaaaatagctacatccctgaacacagtccggaatattacggccggaccagggaatcgggattccagcatcaccaccaggagctgtacccaccaccgcctccgcgccctagctaccctgagcgccagtatagctgcaccagtctccagggacccggcaattcgcgaggccacgggccggcccaggcgggccaccaccaccccgagaaatcacagtcgctctgcgagccggcgcctctctcaggcgcctccgcctccccgtccccagccccgccagcctgcagccaagccagcccccgaccatccctccaagcgccgccaagcaaagcaacccatagtctacccatgggatgaaaaaaattcacgttagcacggtgaaccccaattataacggnggggaaaccaancgctcgaggacaagctatanccggcaacaagtcctggaattagngaaagagttcaattnaancgctacctgacccgaaggagaanggtnganattgccaatcgctgtgcctctctgaaaagnaagntnaaaatccgggtccaaaancgttncatgaatggannaagggcaacggattcccaaaacaaanncaggtcagaaaccccggcnggggngggcccaannccttttancantgagtttcttn

SEQ ID NO: 17 - DNA, 872 bp, Homo sapiens
  misc_feature (3)..(3): n is a, c, g, or t
  misc_feature (6)..(9): n is a, c, g, or t
  misc_feature (14)..(14): n is a, c, g, or t
  misc_feature (16)..(16): n is a, c, g, or t
  misc_feature (30)..(31): n is a, c, g, or t
  misc_feature (34)..(34): n is a, c, g, or t
  misc_feature (51)..(51): n is a, c, g, or t
  misc_feature (65)..(65): n is a, c, g, or t
  misc_feature (75)..(75): n is a, c, g, or t
  misc_feature (588)..(588): n is a, c, g, or t
  misc_feature (659)..(659): n is a, c, g, or t
  misc_feature (666)..(666): n is a, c, g, or t
  misc_feature (670)..(670): n is a, c, g, or t
  misc_feature (673)..(673): n is a, c, g, or t
  misc_feature (676)..(676): n is a, c, g, or t
  misc_feature (711)..(711): n is a, c, g, or t
  misc_feature (714)..(714): n is a, c, g, or t
  misc_feature (730)..(730): n is a, c, g, or t
  misc_feature (743)..(743): n is a, c, g, or t
  misc_feature (754)..(754): n is a, c, g, or t
  misc_feature (762)..(762): n is a, c, g, or t
  misc_feature (764)..(765): n is a, c, g, or t
  misc_feature (768)..(768): n is a, c, g, or t
  misc_feature (792)..(792): n is a, c, g, or t
  misc_feature (802)..(802): n is a, c, g, or t
  misc_feature (812)..(812): n is a, c, g, or t
  misc_feature (815)..(815): n is a, c, g, or t
  misc_feature (826)..(826): n is a, c, g, or t
  misc_feature (828)..(829): n is a, c, g, or t
  misc_feature (843)..(843): n is a, c, g, or t
  misc_feature (853)..(854): n is a, c, g, or t
  misc_feature (857)..(857): n is a, c, g, or t
  misc_feature (865)..(865): n is a, c, g, or t
  misc_feature (872)..(872): n is a, c, g, or t
  nbla-00226-r1
gantgnnnntgttngngtttttttggcccnnggnttttttttcctcaggcncccctgaaattcanccaagccagnccatcacaccttgcaatatataatttttgcagctttttttcttaaaaaataaataaccccccaaaatggccttttaaaaaaaaaaacccagcaggtaccatgctaagacaacatcacatgcttaaaagggtcctgggcgcagcgccggccgggggtgctgacctgactttggtgttggggagtcggtggtccttcttccatttcatgcgacggttttggaaccagattttgatctgcctctcagagaggcacagcgagtgggcgatctcgatccttctccttcgggtcaggtagcggttgtaatgaaactctttctctaattccaggacttgctgccgggtataggctgtcctcgagcgcttgggttcccctccgttataattggggttcaccgtgctaacgtgaatttttttcatccatgggtagactatgggttgcttgctggcggcgctggagggatggtcgggggctggctggctgcaagctggcggggctggggacggggaagcggangcgcctgaaaaaagcgccggctcccaaaacgactgtgaatttcccgggtggtggtggccgcctgggccggnccgttgnctcnccnaantgcccgggtccctggaaaactggtgcaactatacnggngctcaaggtaaccaanggccccgaaggcngttgtgggtanaactcccngnnggnatcctggaatcccaattcctggtncggccgtaanattccggacngtnttaaaggaatntnnccaattttgcgaanatcctcccannggnggaaattncggtttn

SEQ ID NO: 18 - DNA, 928 bp, Homo sapiens
  misc_feature (3)..(4): n is a, c, g, or t
  misc_feature (6)..(9): n is a, c, g, or t
  misc_feature (13)..(13): n is a, c, g, or t
  misc_feature (18)..(19): n is a, c, g, or t
  misc_feature (24)..(27): n is a, c, g, or t
  misc_feature (34)..(36): n is a, c, g, or t
  misc_feature (45)..(45): n is a, c, g, or t
  misc_feature (53)..(53): n is a, c, g, or t
  misc_feature (531)..(531): n is a, c, g, or t
  misc_feature (558)..(558): n is a, c, g, or t
  misc_feature (561)..(561): n is a, c, g, or t
  misc_feature (570)..(570): n is a, c, g, or t
  misc_feature (584)..(584): n is a, c, g, or t
  misc_feature (622)..(622): n is a, c, g, or t
  misc_feature (634)..(634): n is a, c, g, or t
  misc_feature (688)..(688): n is a, c, g, or t
  misc_feature (728)..(728): n is a, c, g, or t
  misc_feature (731)..(731): n is a, c, g, or t
  misc_feature (742)..(742): n is a, c, g, or t
  misc_feature (750)..(750): n is a, c, g, or t
  misc_feature (759)..(759): n is a, c, g, or t
  misc_feature (793)..(793): n is a, c, g, or t
  misc_feature (803)..(803): n is a, c, g, or t
  misc_feature (824)..(824): n is a, c, g, or t
  misc_feature (831)..(831): n is a, c, g, or t
  misc_feature (836)..(836): n is a, c, g, or t
  misc_feature (839)..(839): n is a, c, g, or t
  misc_feature (851)..(851): n is a, c, g, or t
  misc_feature (872)..(872): n is a, c, g, or t
  misc_feature (881)..(881): n is a, c, g, or t
  misc_feature (909)..(909): n is a, c, g, or t
  nbla-00258-f
ggnngnnnntggnggccnnttttnnnngggcccnnngatcctcgntaacggtngccctactggactcgcacgttaggaggctcgggtcgttgtggtgcgctgtcttcccgcttgcgtcagggacctgcccgactcagtggaagcggggagaggtggtgagagatgacccctgttgaggatttcattggtgtctgccacaggccgccatggcatcagatgaaggcaaactttttgttggagggctgagttttgacaccaatgagcagtcgctggagcaggtcttctcaaagtacggacagatctctgaagtggtggttgtgaaagacagggagacccagagatctcggggatttgggtttgtcacctttgagaacattgacgacgctaaggatgccatgatggccatgaatgggaagtctgtagatggacggcagatccgagtagaccaggcaagcaagtcgtcagacaaccgatcccgtgggtaccgtggtggctctgccgggggccggggcttcttccgtgggggccgangacggggccgtgggttctctaaaagangangggaccgangctatggggggaancggttcgagtccaagaatgggggctacggaggctccanagactactatancaaccggagtcaaaatggtggctacaattaccggaactccggcgggtcctacanagacaattacgacaattacctacacacaacgagttaaaanccntcctgctcaanattgtccntccaatggntgtgtgttaaaaattgttggaacttccctgaacnttaatgtttnataaatgcacctcccttgtantcccaantttcnaancaattcggttcnatcttgtaaaaccaacctgancgcttttancccggaatggccccttacaaaactttcntttaaggaatgcgtttttt

SEQ ID NO: 19 - DNA, 931 bp, Homo sapiens
  misc_feature (3)..(4): n is a, c, g, or t
  misc_feature (6)..(9): n is a, c, g, or t
  misc_feature (13)..(13): n is a, c, g, or t
  misc_feature (17)..(17): n is a, c, g, or t
  misc_feature (41)..(41): n is a, c, g, or t
  misc_feature (49)..(49): n is a, c, g, or t
  misc_feature (372)..(372): n is a, c, g, or t
  misc_feature (630)..(630): n is a, c, g, or t
  misc_feature (726)..(726): n is a, c, g, or t
  misc_feature (742)..(742): n is a, c, g, or t
  misc_feature (761)..(761): n is a, c, g, or t
  misc_feature (763)..(763): n is a, c, g, or t
  misc_feature (773)..(773): n is a, c, g, or t
  misc_feature (797)..(797): n is a, c, g, or t
  misc_feature (801)..(801): n is a, c, g, or t
  misc_feature (824)..(825): n is a, c, g, or t
  misc_feature (840)..(840): n is a, c, g, or t
  misc_feature (870)..(870): n is a, c, g, or t
  misc_feature (886)..(886): n is a, c, g, or t
  misc_feature (896)..(896): n is a, c, g, or t
  nbla-00258-r1
ggnngnnnntggnggcnttttttttgggcctcagttcacgnttactgtnggcccgagcttcgtaaaataaagaaaactgcgtacaagaattcctcagccactgcaaatacaacatcgatggagtatgcgtacgtcttccagtaaaaaaggacaatataaataaacatcttcaagaacctctcagggacgtctgcacgtctactgtggggcgcacagcacaagatggacgcaggggctggggctccagggcagttgctgccacacccgccggggtcctaccacactacactcaagaaacgtcacacggagttggaaaaaagccacagcttgctcagcttccgacaaagagcggattcacaagtccgttcgatntcagagaagtgagtggggcaaccacttcatggggccaaccccactaaaaaaaaaaaggcaacgcaaccaaaaactaaaacaaaaaccaaaaaccacacaacccccgatttttttgaaactcatggctcgtggtcaaaaaagtaaatgcttttcaaaatgttttgaaaaccctcaaaaaaaaacagcacttccttaaaaagaaaatctagtaacgaggcatcccggcgtcaaaagcggtcaagctgggtttgcaagatnagaaccgaaatgactacgaaaagtgggaatacaaggaggtgcattactacacattaacgttcaacgaaactccacaatccttaaacacacaaccanttggaaggacattctnaacaaggaagggttttacncnttgtgtgtancgtaactgtctaactgtctctgtngganccgcccaactcccggtcactgtnncaacaatctaatccnggtggcaaaataatccctggagcctccgtnacccccaatcctggantccaaccggnttccccaaaacctcggtccctcctcctctaaaaaa

SEQ ID NO: 20 - DNA, 880 bp, Homo sapiens
  misc_feature (2)..(5): n is a, c, g, or t
  misc_feature (8)..(12): n is a, c, g, or t
  misc_feature (18)..(18): n is a, c, g, or t
  misc_feature (514)..(514): n is a, c, g, or t
  misc_feature (676)..(676): n is a, c, g, or t
  misc_feature (709)..(709): n is a, c, g, or t
  misc_feature (724)..(724): n is a, c, g, or t
  misc_feature (748)..(748): n is a, c, g, or t
  misc_feature (763)..(763): n is a, c, g, or t
  misc_feature (791)..(791): n is a, c, g, or t
  misc_feature (827)..(828): n is a, c, g, or t
  misc_feature (831)..(831): n is a, c, g, or t
  misc_feature (833)..(833): n is a, c, g, or t
  misc_feature (844)..(844): n is a, c, g, or t
  misc_feature (850)..(850): n is a, c, g, or t
  misc_feature (854)..(854): n is a, c, g, or t
  misc_feature (863)..(863): n is a, c, g, or t
  misc_feature (876)..(876): n is a, c, g, or t
  misc_feature (880)..(880): n is a, c, g, or t
  nbla-00312-f
gnnnnttnnnnnggccgnatcccgagcacgttggcctactggattagaaaccacaatctgccaaagcaacctccacttgccctagcaatgggacaggccacacaatgtctaggactgatggctcgatcaggaattggatcctgcgcatttgccacagtggaagactacctacattagctatgcatttcaagagctcacacttatattgtggcatatagtcaacatggaagtagaccagctctgctgatttgaaatttagattttttaaattatgtactggggacaggtttttgtcgctttacattgcttcctaatttacagcatgatgcaaatgattttctaacttaagtgttaggagaaattattttccatctttaacctcctaagtgtctaagagttaaatattactgaatttcagacgttcaaattgatcatcacaaatcctttaaaacaattacctaaaagaaaccaaaaatcctgccttccttgtgggggaagggggagagaggggaanggaatggaacaagttgtgtttgtgttaacatgtgggtgatgtaaacttcaaattgggagatgttccgacccccactcccatataagcattcaatcagtgtaacttgcaaaatgcataaacatcccgacagtttgaatttatagtgttgatggaagaaatcanttttaatgtgtactgtaaacttgaaatactcanggagctgagtgatangttggtgcaacttacaatcccganctggtaatccaatantttgggtttaacaatggccttttcaacnttggttcccggttaactacagatgacttccggtggnnacncncaagtttaacnggtggnttanacaattttncattcaacggggnggtn

SEQ ID NO: 21 - DNA, 887 bp, Homo sapiens
  misc_feature (3)..(3): n is a, c, g, or t
  misc_feature (16)..(16): n is a, c, g, or t
  misc_feature (37)..(37): n is a, c, g, or t
  misc_feature (44)..(44): n is a, c, g, or t
  misc_feature (558)..(558): n is a, c, g, or t
  misc_feature (596)..(596): n is a, c, g, or t
  misc_feature (610)..(610): n is a, c, g, or t
  misc_feature (668)..(668): n is a, c, g, or t
  misc_feature (696)..(696): n is a, c, g, or t
  misc_feature (698)..(698): n is a, c, g, or t
  misc_feature (724)..(724): n is a, c, g, or t
  misc_feature (758)..(759): n is a, c, g, or t
  misc_feature (797)..(797): n is a, c, g, or t
  misc_feature (829)..(829): n is a, c, g, or t
  misc_feature (859)..(859): n is a, c, g, or t
  misc_feature (862)..(862): n is a, c, g, or t
  misc_feature (868)..(868): n is a, c, g, or t
  misc_feature (876)..(876): n is a, c, g, or t
  misc_feature (881)..(881): n is a, c, g, or t
  misc_feature (887)..(887): n is a, c, g, or t
  nbla-00312-r1
ggnggctttttttttnggcttggttaattatatcacnacatttnattgcaatatagtactcatttaagcacttaaaaatggaaggtgtacaaagattaaattaagacacggtaaattgactaaatatttggtttttatataaataaaggtcataaccacaccgttgacatgtaatactgttataatacaacagttaaacttgtgagtctacaacagaagtcatctgtagttaaacaggaaacaaagttgaaaaagaccatgttaaaacaaaactactgggactaacaggtcgggattgtaagtagcaacaaacatattcactcagctcctgagtatttcaagttttacagtacacattaaaaatgatttcttccatcaacactataaattcaaactgtcggatgtttatgcattttgcaagttacactgattgaatgcttatatgggagtgggggtcgggacatctcccaatttgaagtttacatcacccacatgctaacacaaacacaacttgttccatttccttcccctctctcccccctcccccacaaagaaggnaggattttgggttcctttaagtaattggtttaaagggnttgtgatgatcaanttgaacgtctgaaattcagtaatatttaactcctaagcaactaaagagggttaagatnggaaataaatttccccaacactaagttngnaaatcaattgcacatgctgtaactanggaacaatgttaagcgacaaaaacctgtcccaanncataatttaaaaatccaaatttcaaatcaacaaaactnggccacttccatgttgactaaatgccacatanaagtgtggctcctgaaatgcaaaacctaangtnggtagnctccaccnggggnaaatgn

SEQ ID NO: 22 - DNA, 1740 bp, Homo sapiens
  nbla-00315
gaattcctcgagcactgttggcctactggttacaagatcgagaatggttaacagaactttttcaacaaagcaaggtcaatatgcagaaaatgctcccagaaattgatcagaataaggaccgcatgttggagattttggaaggaaagggactgagtttcttattcccactcctcaaattggagaaggaactgttgaagcaaataaagttggatccatcccctcaaaccatatataaatggattaaagataacatctctcccaaacttcatgtagataaaggatttgtgaacatcttaatgactagcttcttacagtacatttctagtgaagtaaacccccccagcgatgaaacagactcatcctctgctccttccaaagaacagttagagcaggaaaaacaactactactatctttcaagccagtaatgcagaaatttcttcatgatcacgttgatctacaagtcagtgccctgtatgctctccaggtgcactgctataacagcaacttcccaaaaggcatgttactcgcttttttgtgcacttctatgacatggaaattattgaagaagaagctttcttggcttggaaagaagatataacccaagagtttccgggaaaaggcaaggctttgttccaggtgaatcagtggctaacctggttagaaactgctgaagaagaagaatcagaggaagaagctgactaaagaaccagccaaagccttaaattgtgcaaaacatactgttgctatgatgtaactgcatttgacctaaccactgcgaaaattcattccgctgtaatgttttcacaatatttaaagcagaagcactttttttcactgcattctagttgtggtttgtccaaactcatcaatgtatcttatcatgtctggatccccgggtaccgagctcgaattaattcctcttccgcttcctcgctcactgactcgctgcgctcgtcgttcggctgcggcgagcggtatcagctcactcaaaggcggtaatacggttatccacagaatcagggggtcagttaggatttccttctgcataaggtttttttgtagtgtaatgtcttaatcatagtctaccatcaaatattttaggagtatctttaatgtttagatagtatattagcagcatgcaataattacatcataagttctcaagcagaggcagtctattgcaaggaccttctttgctgccagttatcataggctgttttaagttagaaaactgaatagcaacactgaatactgtagaaatgcactttgctcagtaatacttgagttgttgcaatatttgattatccatttggttgttacagaaaaattcttaactgtaattgatggttgttgccgtaatagtatattgcctgtatttctacctctagtaatgggctttatgtgctagattttaatatccttgagcctgggcaagtgcacaagtctttttaaaagaaacatggtttacttgcacaaaactgatcagttttgagagatcgttaatgcccttgaagtggtttttgtgggtgtgaaacaaatggtgagaatttgaattgctccctcctattatagtattgaaattaagtctacttaatttatcaagtcatgttcatgccctgattttatatacttgtatctatcaataaacattgtgatacttgaaaaaaaaaaaaaaaaaaaaaaaaaaaaaaaaaaaaaggccacatgtgctcgagctgcaggtcgcggccgctagacta

SEQ ID NO: 23 - DNA, 843 bp, Homo sapiens
  misc_feature (2)..(2): n is a, c, g, or t
  misc_feature (4)..(5): n is a, c, g, or t
  misc_feature (9)..(12): n is a, c, g, or t
  misc_feature (18)..(18): n is a, c, g, or t
  misc_feature (28)..(28): n is a, c, g, or t
  misc_feature (35)..(35): n is a, c, g, or t
  misc_feature (575)..(575): n is a, c, g, or t
  misc_feature (688)..(688): n is a, c, g, or t
  misc_feature (692)..(692): n is a, c, g, or t
  misc_feature (699)..(699): n is a, c, g, or t
  misc_feature (704)..(704): n is a, c, g, or t
  misc_feature (708)..(708): n is a, c, g, or t
  misc_feature (721)..(721): n is a, c, g, or t
  misc_feature (727)..(727): n is a, c, g, or t
  misc_feature (731)..(731): n is a, c, g, or t
  misc_feature (738)..(738): n is a, c, g, or t
  misc_feature (745)..(745): n is a, c, g, or t
  misc_feature (758)..(758): n is a, c, g, or t
  misc_feature (760)..(760): n is a, c, g, or t
  misc_feature (781)..(781): n is a, c, g, or t
  misc_feature (785)..(785): n is a, c, g, or t
  misc_feature (788)..(789): n is a, c, g, or t
  misc_feature (793)..(793): n is a, c, g, or t
  misc_feature (798)..(798): n is a, c, g, or t
  misc_feature (806)..(806): n is a, c, g, or t
  misc_feature (828)..(829): n is a, c, g, or t
  misc_feature (831)..(831): n is a, c, g, or t
  misc_feature (833)..(833): n is a, c, g, or t
  misc_feature (841)..(841): n is a, c, g, or t
  nbla-00417-f
gngnntttnnnngggccnggatctcgtngcacggnggccctactgggatttcaagcacagcacatctctcactcaggatgaaagcactcttaccgaagtgaaatcctaccattgtaatgactgtggggaagactttagtcacattacagactttactgaccatcagaggatccatactgcagagaacccctatgattgtgagcaggcttttagtcagcaagctatttctcatcctggagagaaaccctatcaatgtaatgtatgtgggaaagctttcaaaaggagtacaagtttcatagagcatcacagaattcatactggagagaaaccctatgaatgtaatgagtgtggagaagcctttagtcgacgctcatcgcttactcaacatgagagaacccacactggagagaaaccctatgaatgtattgactgtgggaaagcctttagtcaaagttcatctctcattcagcatgagagaactcatactggagagaagccctatgaatgtaatgaatgtgggagagccttccgaaaaaaaaccaacctgcatgatcatcaagagaattcatactggngaaaaaccctaatcctgtaagggatgtgggaaaaacttcaaccgaagttcaactcttactaaacaccaagagaattcatactcgaaataaactcctaggaacgttgaaattanggantttgcanatgcnttanctaaaatgttccngatcanggtnagagggntcttaanaccttggaatgtnangaattactggggggttaaacnttgngtnngggnaaaantgcaattnacaaatttttttttttttacannangnccatcccnat

SEQ ID NO: 24 - DNA, 836 bp, Homo sapiens
  misc_feature (4)..(4): n is a, c, g, or t
  misc_feature (7)..(13): n is a, c, g, or t
  misc_feature (46)..(46): n is a, c, g, or t
  misc_feature (51)..(51): n is a, c, g, or t
  misc_feature (589)..(589): n is a, c, g, or t
  misc_feature (592)..(592): n is a, c, g, or t
  misc_feature (606)..(606): n is a, c, g, or t
  misc_feature (620)..(620): n is a, c, g, or t
  misc_feature (631)..(631): n is a, c, g, or t
  misc_feature (636)..(636): n is a, c, g, or t
  misc_feature (688)..(688): n is a, c, g, or t
  misc_feature (714)..(714): n is a, c, g, or t
  misc_feature (731)..(731): n is a, c, g, or t
  misc_feature (736)..(736): n is a, c, g, or t
  misc_feature (748)..(749): n is a, c, g, or t
  misc_feature (754)..(754): n is a, c, g, or t
  misc_feature (757)..(757): n is a, c, g, or t
  misc_feature (759)..(759): n is a, c, g, or t
  misc_feature (764)..(764): n is a, c, g, or t
  misc_feature (776)..(776): n is a, c, g, or t
  misc_feature (779)..(779): n is a, c, g, or t
  misc_feature (782)..(782): n is a, c, g, or t
  misc_feature (793)..(793): n is a, c, g, or t
  misc_feature (796)..(797): n is a, c, g, or t
  misc_feature (812)..(812): n is a, c, g, or t
  misc_feature (829)..(829): n is a, c, g, or t
  misc_feature (835)..(835): n is a, c, g, or t
  nbla-00417-r1
gggntgnnnnnnntgtggctttttttttggcctttaaagagatggngtttnaccatgttgtccaaggctgggtcttgaactcctgggttcaagcagtctatctgccttagccacccaaagtgctgggattacaggtgtgagacaccatacctagccaagttaatttttttaatggtgaaatcttttctttgcacataaaatgagccagtgcatgttgcttctctgagtacaagacaaaatttatggcaatgggcaattagacttatacttttctgcaagaaaattaacgggaaaattctcctcttagttttctgttgttttcccattgatctgatactgtaggcttaagaaagtgctttttcatgggcatgccataaaaagtacaataaggggacttaatagttctgtgaaactggcatatgttagctgaaagtataattgtaactgggaaaaggggaaaaaagtcactaagtagttcaaccatctacagtttctgttaaattgtggtttgtaaagcctccaagaagttgctttaaataatttgtgataaatttgcatacattttgctcccacttatacctttaagaantcncaaaagtgtccaanccataaggggccantaaatgtttgnggtanccgatacatctaaaattatttaaagcctctgatccaaaaataacctttcacnggaaaggcaaggggcccaaatcaagnaaccgcattttaaccancttancctaaaggcggnncaacnggngnaacanttaaaccttggnttnaancctcaacggtnaannaatggttggcaattntcaatcctttaaggggnctcccng

SEQ ID NO: 25 - DNA, 844 bp, Homo sapiens
  misc_feature (2)..(5): n is a, c, g, or t
  misc_feature (9)..(13): n is a, c, g, or t
  misc_feature (18)..(18): n is a, c, g, or t
  misc_feature (27)..(27): n is a, c, g, or t
  misc_feature (29)..(29): n is a, c, g, or t
  misc_feature (53)..(53): n is a, c, g, or t
  misc_feature (65)..(65): n is a, c, g, or t
  misc_feature (626)..(626): n is a, c, g, or t
  misc_feature (642)..(642): n is a, c, g, or t
  misc_feature (701)..(701): n is a, c, g, or t
  misc_feature (707)..(707): n is a, c, g, or t
  misc_feature (711)..(711): n is a, c, g, or t
  misc_feature (722)..(722): n is a, c, g, or t
  misc_feature (724)..(724): n is a, c, g, or t
  misc_feature (726)..(726): n is a, c, g, or t
  misc_feature (728)..(728): n is a, c, g, or t
  misc_feature (780)..(780): n is a, c, g, or t
  misc_feature (785)..(785): n is a, c, g, or t
  misc_feature (790)..(790): n is a, c, g, or t
  misc_feature (795)..(795): n is a, c, g, or t
  misc_feature (814)..(814): n is a, c, g, or t
  misc_feature (817)..(817): n is a, c, g, or t
  misc_feature (840)..(840): n is a, c, g, or t
  misc_feature (843)..(843): n is a, c, g, or t
  nbla-00428-f
gnnnntttnnnnnggccnggatcctcntncacggggcccctactgggcattcnatttcttttggnttgaagctaaagagatgtgtagctcacaggggctaccttaccagtataaagagctgataacagtactcagaagaatctgtgaacaaatacttgaaaatgggttcaatgtagactgccattatgtgtggtcttcccattaaatgtgaacattttaatatgtatgcattcaccttgcctcttgcacaaatgtcaaaaaaaagatggtaatatctcaaagaaatgaacttgtagattaccaagcagtttgctaaaaattcaatctttgacccaagctgtagcatttttttttcatgtgtggcatctttttcatgccaccaacaaacttgttgtgtgtgtgcgtgtgtgtgtgtgtgtgtgtgtgtgtgtgtgtgtgttctgtacccactaggatttgtttaggtgcccattgcatctttttgtgctatggagttgtttacattaagcatgaccgaacgagagacaatactatttcccacaggagtccattgggttcagctttgaaagaggaatagaatcgaggctcctttgaccatcaaaatgatgaactttactatgtggtanccaatgccagaatgtnagagttgcaagtgattttgtgctgctatcattaaaacttgtattccaatcctgccaacntaaggngatnaagatattaanangnanccctgatttaatttccagtattcagtagtaaaatttcctgtccactggtgancaaancctgntcacncaattaacctgggcacacnaanaagggtttatttgatggggtccnttnc

SEQ ID NO: 26 - DNA, 842 bp, Homo sapiens
  misc_feature (3)..(3): n is a, c, g, or t
  misc_feature (6)..(11): n is a, c, g, or t
  misc_feature (47)..(47): n is a, c, g, or t
  misc_feature (510)..(510): n is a, c, g, or t
  misc_feature (579)..(579): n is a, c, g, or t
  misc_feature (671)..(671): n is a, c, g, or t
  misc_feature (704)..(704): n is a, c, g, or t
  misc_feature (727)..(728): n is a, c, g, or t
  misc_feature (757)..(758): n is a, c, g, or t
  misc_feature (767)..(767): n is a, c, g, or t
  misc_feature (786)..(786): n is a, c, g, or t
  misc_feature (836)..(836): n is a, c, g, or t
  nbla-00428-r1
ggntgnnnnnntgtggcttttttttgccttgtttgtttgtttgtttntgtttcttaccttggggggtaggaggagttaaaggaggagaaattttactattgggggggggaaacgaacacaatcaaaataaaaccttattagtgtgtccaaggttaaatagagtgactcaggctttgattcacagtggacaggaaaattttactactgaatactggaaaataaatcaaggatacctcttaatatcttgatctccttaagctggcaagactggaatacaagttttaatgaatagcagcacaaaatcacttgcaactcttacattctggcattgggtaccacataagtaaagttcatcattttgatggtcaaaggagcctcgattctattcctctttcaaagctgaacccaatggactcctgtgggaaatagtattgtctctcgttcggtcatgcttaatgtaaacaactccatagcacaaaaagatgcaatgggcacctaaacaaatcctantgggtacagaacacacacacacacacacacacacacacacacacacgcacacacacaacaagtttgttnggggcatgaaaaaagatgccacacatgaaaaaaaaatgctacaacttgggtcaaagattgaatttttagcaaactgcttggaaaccacaagntcattccttgagatattacaaccttttttgcanttgtcaaaaaggaaaggtaatgnntcaatattaaatgtccaatttatgggaanncccccttangggatccaaattgacccantttcaataattgtcaaaaatcctccgaatacggttacaaaccctttaacngggaag

SEQ ID NO: 27 - DNA, 879 bp, Homo sapiens
  misc_feature (2)..(2): n is a, c, g, or t
  misc_feature (4)..(14): n is a, c, g, or t
  misc_feature (19)..(21): n is a, c, g, or t
  misc_feature (24)..(28): n is a, c, g, or t
  misc_feature (34)..(34): n is a, c, g, or t
  misc_feature (44)..(45): n is a, c, g, or t
  misc_feature (467)..(467): n is a, c, g, or t
  misc_feature (663)..(663): n is a, c, g, or t
  misc_feature (704)..(704): n is a, c, g, or t
  misc_feature (708)..(708): n is a, c, g, or t
  misc_feature (723)..(723): n is a, c, g, or t
  misc_feature (741)..(741): n is a, c, g, or t
  misc_feature (785)..(785): n is a, c, g, or t
  misc_feature (819)..(819): n is a, c, g, or t
  misc_feature (855)..(878): n is a, c, g, or t
  nbla-00434-f
gngnnnnnnnnnnngaggnnnttnnnnnggcccnggatcctcgnncacggtggccctactggtatatactgggccagtaaaatgggcctcccaattgctgtttcagcaggttttaaaccttcaggaacaccagttaggaaaatagctccagaaaatatagatatattttatttttattaaaatggcagtctacatcataattggcatttctcaagactgtctttaccagaatctgtgtgaaataaggcaatctagtctccttgaaaaaaaaatctcttggatgtttaggaaggaagacttggccgtgatgtggtgtcctggctttgtggtgtagtgctgtgtgtatggagttagtgtaaaaacatggattacaccaagtggaagaaacgtcttcttgccaagctcattcttagaacttacacatctagaacagcttccactttggcagtgaggtcgtagccttttangtggaagaagtgagggtgcaacgtgtcagacacaacattcatgttactcttacattgggatctgaaggtagttcagacttcgtgggttttgtttttaagcaaaacaatgtgaaaacatttaagtttgaaatgttgcatttgaagttatgatcatttaatatattcatattaccaagactattatactggaagtggnttttgtgttataaagggttaattttacataaggcagttacntaangtgatttttaacccntaaaaaagtggggatgtntacatttgttaacaatgccatgaaagcaatttccttcccccaanggaaaagtgaattctaacagaatatccggctggncctgtaatttaattaaataaaattttggggaacaannnnnnnnnnnnnnnnnnnnnnnna

SEQ ID NO: 28 - DNA, 866 bp, Homo sapiens
  misc_feature (3)..(3): n is a, c, g, or t
  misc_feature (6)..(9): n is a, c, g, or t
  misc_feature (30)..(31): n is a, c, g, or t
  misc_feature (48)..(48): n is a, c, g, or t
  misc_feature (50)..(52): n is a, c, g, or t
  misc_feature (62)..(62): n is a, c, g, or t
  misc_feature (273)..(273): n is a, c, g, or t
  misc_feature (279)..(279): n is a, c, g, or t
  misc_feature (432)..(432): n is a, c, g, or t
  misc_feature (470)..(470): n is a, c, g, or t
  misc_feature (472)..(472): n is a, c, g, or t
  misc_feature (489)..(489): n is a, c, g, or t
  misc_feature (519)..(519): n is a, c, g, or t
  misc_feature (525)..(525): n is a, c, g, or t
  misc_feature (545)..(545): n is a, c, g, or t
  misc_feature (552)..(552): n is a, c, g, or t
  misc_feature (657)..(657): n is a, c, g, or t
  misc_feature (660)..(660): n is a, c, g, or t
  misc_feature (690)..(690): n is a, c, g, or t
  misc_feature (709)..(709): n is a, c, g, or t
  misc_feature (725)..(725): n is a, c, g, or t
  misc_feature (728)..(728): n is a, c, g, or t
  misc_feature (743)..(743): n is a, c, g, or t
  misc_feature (754)..(754): n is a, c, g, or t
  misc_feature (762)..(762): n is a, c, g, or t
  misc_feature (770)..(770): n is a, c, g, or t
  misc_feature (785)..(785): n is a, c, g, or t
  misc_feature (807)..(807): n is a, c, g, or t
  misc_feature (810)..(810): n is a, c, g, or t
  misc_feature (812)..(812): n is a, c, g, or t
  misc_feature (817)..(817): n is a, c, g, or t
  misc_feature (826)..(826): n is a, c, g, or t
  misc_feature (837)..(837): n is a, c, g, or t
  misc_feature (845)..(847): n is a, c, g, or t
  misc_feature (860)..(860): n is a, c, g, or t
  misc_feature (863)..(863): n is a, c, g, or t
  misc_feature (865)..(865): n is a, c, g, or t
  nbla-00434-r1
ggntgnnnntgggggctttttttgggcctnntttttttaattggcctngnnnttttttttgnttctccaaaattttattttaatttaaattacagggccagccagatattctgataagaaattcacttttccttaggagaaagaaaatgctttcatggcattgttaacaaatgtatacatctccacttttttaagggttaaaaatcacattaagtaactgccttatgtaaaattaaacctttataacacaaaaaccacttccagtataatagncttggnaatatgaatatattaaatgatcataacttcaaatgcaacatttcaaacttaaatgttttcacattgttttgcttaaaaacaaaacccacgaagtctgaactaccttcagattccaatgtaagagtaacatgaatgttgtgtctgacacgctgnaccctcacttcttccacctaaaagggtacgacctcacngncaaagtggaactgttcnaaatgggtaagttccaaaaatgagcttggnaagaanacgtttcctccacttggggnaatccangtttttacactaactccatacacacagcactacaccacaaagccaaggacaccacatcacgggcaagtcttccttcccaaacatccaaggagattttttttcaanggngaccaaaatgccctaattcacacagattcngggaaaagacagtcctganaaatgccaaattttgngtnaaccggcaatttaanaaaataaatanacccaaantttccggngccaatttcccaacnggggttcccgaaggttaaaccngcngnaaaancaattgganggccattttcnggcaagtnnnccaattgggcaanaangnc

SEQ ID NO: 29 - DNA, 847 bp, Homo sapiens
  misc_feature (2)..(2): n is a, c, g, or t
  misc_feature (4)..(5): n is a, c, g, or t
  misc_feature (9)..(12): n is a, c, g, or t
  misc_feature (18)..(18): n is a, c, g, or t
  misc_feature (26)..(26): n is a, c, g, or t
  misc_feature (37)..(37): n is a, c, g, or t
  misc_feature (710)..(710): n is a, c, g, or t
  misc_feature (741)..(741): n is a, c, g, or t
  misc_feature (747)..(747): n is a, c, g, or t
  misc_feature (779)..(779): n is a, c, g, or t
  misc_feature (788)..(788): n is a, c, g, or t
  misc_feature (790)..(790): n is a, c, g, or t
  misc_feature (811)..(811): n is a, c, g, or t
  misc_feature (816)..(816): n is a, c, g, or t
  misc_feature (835)..(835): n is a, c, g, or t
  misc_feature (847)..(847): n is a, c, g, or t
  nbla-00460-f
gngnntttnnnngggccnggatctcntgcacggggcncctactggttcttccagtcacctcggcccgggatcgggaagtgtcaagcgggcgctcccccatctccgccgctattaccactgaacccggaccccctacccaggtccagggccagccgccatgacgaacgtgtactccttggatgggattctggtgtttggtttgctctttgtttgcacctgtgcctacttcaagaaagtacctcgtctcaaaacctggctgctatcagagaagaagggtgtttggggtgtgttttacaaagccgctgtgattggaaccaggctgcatgctgctgtggcaattgcttgtgttgtaatggccttttacgtcctgtttataaaatgaattccaaagcacccaagtcatcaactgccaaccaaggggacggggatgaagaacctgttggagacctgaacccagtgtaggagagttcagctgaaatcatcggtccccaggatgacaccacagcatctgcccctgctatatgtggggaaaactcatggtcacgaacattatttatgcttcaggggactacagaaagccagcttcctttgatctatgtgtaaatcagtccttggcagagtgcatataatgtccggataaattcatctagtataagaacttgtgatgttagattgaagttttgtcatcctataaaagacaacaaacttantttctgtttaagtccgaatgttaatggcaanttttanttgattacttaattttctaaccaaattttaantttcctcanantgcaattgcccttaattgtcnctggnaattccaattactttaggncatgagaaattn

SEQ ID NO: 30 - DNA, 862 bp, Homo sapiens
  misc_feature (3)..(3): n is a, c, g, or t
  misc_feature (6)..(11): n is a, c, g, or t
  misc_feature (40)..(40): n is a, c, g, or t
  misc_feature (47)..(47): n is a, c, g, or t
  misc_feature (56)..(56): n is a, c, g, or t
  misc_feature (527)..(527): n is a, c, g, or t
  misc_feature (621)..(621): n is a, c, g, or t
  misc_feature (654)..(654): n is a, c, g, or t
  misc_feature (656)..(656): n is a, c, g, or t
  misc_feature (683)..(683): n is a, c, g, or t
  misc_feature (697)..(697): n is a, c, g, or t
  misc_feature (704)..(704): n is a, c, g, or t
  misc_feature (706)..(706): n is a, c, g, or t
  misc_feature (746)..(746): n is a, c, g, or t
  misc_feature (750)..(750): n is a, c, g, or t
  misc_feature (758)..(758): n is a, c, g, or t
  misc_feature (763)..(763): n is a, c, g, or t
  misc_feature (795)..(795): n is a, c, g, or t
  misc_feature (803)..(803): n is a, c, g, or t
  misc_feature (811)..(811): n is a, c, g, or t
  misc_feature (833)..(833): n is a, c, g, or t
  misc_feature (835)..(835): n is a, c, g, or t
  nbla-00460-r1
ggntgnnnnnntggggcctttttttggccctttagggaanaaaagtncattttcancggatttgtgcagacaatggtgaataaaaaattgtatttcaactataaaaaggagctgacttcattccaccctggcctacagggtttatggtgatgccagtttgaatctgaggcaatactgctatccccattcctccacctgtaaaagattcccccagaggaataacattctataacttttagtcaaaaatatgtaagacacatcaaacaaagtaatgagttaaacaagtttctgcttatctgcttagggaaagtcaagaaatgaaacaaatgtatatttgtttctggctgtaaattacctttaccttgtgcactttttggtacattctggtatgaaaacctctcaaaatgtaacaacacaagagtttgggtcaagacgacccacccaggaggctgtaaaaactggtttgaactaaaactgtggaatgggactagtttaaaatatgaagcaactctaaacaccaagcttanagacatttgccctattaagaaaacaaagatcattaaagctacaaaataacaagtgcaaacatgctgaacctgtttccaaggagtgacattcccntctgccaacaagtcccaaactcacacccacaangngtaactctccttcctggtccactaaanttcctttctctcanctcaaangncctcaaaaatgacaatgggaaacgtatgaattgttgaaanttancctgtggnccaantcccggaagagataacaaccacaactcctganatgattanacatgcantgtttacttgatgactttccgnanttctaaaaaccccaaagcaataaaatg

SEQ ID NO: 31 - DNA, 859 bp, Homo sapiens
  misc_feature (2)..(2): n is a, c, g, or t
  misc_feature (4)..(4): n is a, c, g, or t
  misc_feature (9)..(11): n is a, c, g, or t
  misc_feature (18)..(18): n is a, c, g, or t
  misc_feature (27)..(27): n is a, c, g, or t
  misc_feature (38)..(38): n is a, c, g, or t
  misc_feature (644)..(644): n is a, c, g, or t
  misc_feature (712)..(712): n is a, c, g, or t
  misc_feature (744)..(744): n is a, c, g, or t
  misc_feature (786)..(786): n is a, c, g, or t
  misc_feature (814)..(814): n is a, c, g, or t
  misc_feature (837)..(837): n is a, c, g, or t
  misc_feature (852)..(852): n is a, c, g, or t
  misc_feature (858)..(858): n is a, c, g, or t
  nbla-00478-f
gngnttttnnngggcccnggatcctcntgcacggggcncctactgggacgggaattttttgggagctgggaaaggaattcatcttagccccaaatgaccattttaataatttgcctgtgaacatcagtctaagtgacgtccaagtaccaacgaacatgtacaacaaagaccctgcaattgtcaatggggttttttggtctgaatctctaaacaaagtttttgtagataactttgaccgtgacccatctctcatatggcagtactttggaagtgcaaagggcttttttaggcagtatccggggattaaatgggaaccagatgagaatggagtcattgccttcgactgcaggaaccgaaaatggtacatccaggcagcaacttctccgaaagacgtggtcattttagttgatgtcagtggcagcatgaaaggactccgtctgactatcgcgaagcaaacagtctcatccattttggatacacttggggatgatgacttcttcaacataattgcttataatgaggagcttcactatgtggaaccttgcctgaatggaactttggtgcaagccgacaggacaaacaaagagcacttcagggagcatctggacaaacttttcgccaaaggaattggatgttggatatanctctgaatgaggccttcaacattctgagtgatttcaaccacacgggacaaggaagtatctgcagtcanggcatcatgctcataactgatggggcggtggncacctatgatacaatctttgcaaaatacaaattgggcagatngaaaaggtcgcatcttcacatacctcantgggcgaaaagctgcctttgcanacaatccaaagtggntggccng

SEQ ID NO: 32 - DNA, 863 bp, Homo sapiens
  misc_feature (5)..(6): n is a, c, g, or t
  misc_feature (11)..(11): n is a, c, g, or t
  misc_feature (37)..(37): n is a, c, g, or t
  misc_feature (62)..(62): n is a, c, g, or t
  misc_feature (69)..(69): n is a, c, g, or t
  misc_feature (79)..(79): n is a, c, g, or t
  misc_feature (92)..(92): n is a, c, g, or t
  misc_feature (109)..(109): n is a, c, g, or t
  misc_feature (111)..(111): n is a, c, g, or t
  misc_feature (115)..(115): n is a, c, g, or t
  misc_feature (123)..(123): n is a, c, g, or t
  misc_feature (127)..(128): n is a, c, g, or t
  misc_feature (130)..(131): n is a, c, g, or t
  misc_feature (160)..(160): n is a, c, g, or t
  misc_feature (166)..(166): n is a, c, g, or t
  misc_feature (173)..(173): n is a, c, g, or t
  misc_feature (175)..(175): n is a, c, g, or t
  misc_feature (185)..(185): n is a, c, g, or t
  misc_feature (187)..(187): n is a, c, g, or t
  misc_feature (190)..(190): n is a, c, g, or t
  misc_feature (194)..(194): n is a, c, g, or t
  misc_feature (206)..(206): n is a, c, g, or t
  misc_feature (214)..(214): n is a, c, g, or t
  misc_feature (230)..(230): n is a, c, g, or t
  misc_feature (242)..(242): n is a, c, g, or t
  misc_feature (246)..(246): n is a, c, g, or t
  misc_feature (248)..(248): n is a, c, g, or t
  misc_feature (252)..(252): n is a, c, g, or t
  misc_feature (258)..(258): n is a, c, g, or t
  misc_feature (266)..(266): n is a, c, g, or t
  misc_feature (279)..(279): n is a, c, g, or t
  misc_feature (281)..(282): n is a, c, g, or t
  misc_feature (288)..(288): n is a, c, g, or t
  misc_feature (291)..(291): n is a, c, g, or t
  misc_feature (298)..(298): n is a, c, g, or t
  misc_feature (300)..(301): n is a, c, g, or t
  misc_feature (303)..(303): n is a, c, g, or t
  misc_feature (306)..(306): n is a, c, g, or t
  misc_feature (308)..(308): n is a, c, g, or t
  misc_feature (311)..(311): n is a, c, g, or t
  misc_feature (314)..(315): n is a, c, g, or t
  misc_feature (338)..(338): n is a, c, g, or t
  misc_feature (340)..(340): n is a, c, g, or t
  misc_feature (343)..(343): n is a, c, g, or t
  misc_feature (346)..(346): n is a, c, g, or t
  misc_feature (349)..(349): n is a, c, g, or t
  misc_feature (361)..(361): n is a, c, g, or t
  misc_feature (370)..(371): n is a, c, g, or t
  misc_feature (377)..(377): n is a, c, g, or t
  misc_feature (382)..(382): n is a, c, g, or t
  misc_feature (385)..(386): n is a, c, g, or t
  misc_feature (394)..(394): n is a, c, g, or t
  misc_feature (396)..(396): n is a, c, g, or t
  misc_feature (399)..(400): n is a, c, g, or t
  misc_feature (412)..(413): n is a, c, g, or t
  misc_feature (420)..(420): n is a, c, g, or t
  misc_feature (422)..(422): n is a, c, g, or t
  misc_feature (427)..(427): n is a, c, g, or t
  misc_feature (434)..(437): n is a, c, g, or t
  misc_feature (444)..(445): n is a, c, g, or t
  misc_feature (449)..(449): n is a, c, g, or t
  misc_feature (455)..(455): n is a, c, g, or t
  misc_feature (461)..(461): n is a, c, g, or t
  misc_feature (470)..(471): n is a, c, g, or t
  misc_feature (480)..(480): n is a, c, g, or t
  misc_feature (483)..(483): n is a, c, g, or t
  misc_feature (487)..(487): n is a, c, g, or t
  misc_feature (492)..(492): n is a, c, g, or t
  misc_feature (495)..(495): n is a, c, g, or t
  misc_feature (505)..(505): n is a, c, g, or t
  misc_feature (517)..(518): n is a, c, g, or t
  misc_feature (533)..(533): n is a, c, g, or t
  misc_feature (540)..(540): n is a, c, g, or t
  misc_feature (554)..(555): n is a, c, g, or t
  misc_feature (564)..(565): n is a, c, g, or t
  misc_feature (567)..(568): n is a, c, g, or t
  misc_feature (582)..(582): n is a, c, g, or t
  misc_feature (602)..(602): n is a, c, g, or t
  misc_feature (605)..(605): n is a, c, g, or t
  misc_feature (608)..(608): n is a, c, g, or t
  misc_feature (618)..(618): n is a, c, g, or t
  misc_feature (625)..(625): n is a, c, g, or t
  misc_feature (632)..(632): n is a, c, g, or t
  misc_feature (634)..(634): n is a, c, g, or t
  misc_feature (638)..(638): n is a, c, g, or t
  misc_feature (640)..(640): n is a, c, g, or t
  misc_feature (649)..(649): n is a, c, g, or t
  misc_feature (651)..(651): n is a, c, g, or t
  misc_feature (660)..(660): n is a, c, g, or t
  misc_feature (668)..(668): n is a, c, g, or t
  misc_feature (671)..(672): n is a, c, g, or t
  misc_feature (674)..(674): n is a, c, g, or t
  misc_feature (676)..(677): n is a, c, g, or t
  misc_feature (692)..(692): n is a, c, g, or t
  misc_feature (694)..(694): n is a, c, g, or t
  misc_feature (702)..(702): n is a, c, g, or t
  misc_feature (721)..(723): n is a, c, g, or t
  misc_feature (728)..(728): n is a, c, g, or t
  misc_feature (736)..(736): n is a, c, g, or t
  misc_feature (741)..(741): n is a, c, g, or t
  misc_feature (746)..(747): n is a, c, g, or t
  misc_feature (755)..(755): n is a, c, g, or t
  misc_feature (758)..(758): n is a, c, g, or t
  misc_feature (760)..(760): n is a, c, g, or t
  misc_feature (764)..(765): n is a, c, g, or t
  misc_feature (775)..(775): n is a, c, g, or t
  misc_feature (786)..(786): n is a, c, g, or t
  misc_feature (792)..(792): n is a, c, g, or t
  misc_feature (799)..(799): n is a, c, g, or t
  misc_feature (802)..(802): n is a, c, g, or t
  misc_feature (807)..(808): n is a, c, g, or t
  misc_feature (810)..(810): n is a, c, g, or t
  misc_feature (825)..(825): n is a, c, g, or t
  misc_feature (838)..(838): n is a, c, g, or t
  misc_feature (847)..(847): n is a, c, g, or t
  misc_feature (853)..(853): n is a, c, g, or t
  nbla-00478-r1
ggtgnnttgtnggcgtcttttctgggttctgctggtnttagtggcctgggcccttttttttnaaggccntttttttttntttttttttgttngtttttgttttgggtcncntttntgtttgtntttnntnnttgctttgtttttttttttttttttttgntttttnttttttngngttttttgtngnttntttngtgtttttcttnttttttcngtttttgttttttttntttttttttttntctntntttntttttntttttgtnttttgtttttttntnnttgttngtnttgttgntnntnttntnctnttnntttttgtgttttgtttttggttntnttngtnttntttttttctttngtcgttttnntttctnttttnttnntttttttntnttnntctgttttgggnngtggtgntnttctnttttttnnnnttttttnntttnttgttntggttntttcttttnntttttctcntgntttnttttnttntttcttgttntgtttttgtttnntttgttttttttgtnttttttntttttttttttttnnctttttttnntnntcctgtttttttgngtttgttgtgttttcttttnttnttncgtttgtgtnctcttcngtctttntntttntnttttttttntnttttttttnttcctttnctnntntnnggttttgtgtgtgtntntgtttttnttttgtttttttttttttnnnttgtntttttttngtttnttttnntttttttnttntntttnnttttgtttcntttgttttgtnttcttnttttttnttngtttnntntttctttttgttccnttgttttgtttgnttgtttttnttgttntttctttttg

SEQ ID NO: 33 - DNA, 831 bp, Homo sapiens
  misc_feature (9)..(9): n is a, c, g, or t
  misc_feature (605)..(605): n is a, c, g, or t
  misc_feature (652)..(652): n is a, c, g, or t
  misc_feature (656)..(656): n is a, c, g, or t
  misc_feature (750)..(750): n is a, c, g, or t
  misc_feature (753)..(753): n is a, c, g, or t
  misc_feature (781)..(781): n is a, c, g, or t
  misc_feature (783)..(783): n is a, c, g, or t
  misc_feature (799)..(800): n is a, c, g, or t
  misc_feature (814)..(814): n is a, c, g, or t
  misc_feature (819)..(819): n is a, c, g, or t
  misc_feature (821)..(821): n is a, c, g, or t
  misc_feature (826)..(826): n is a, c, g, or t
  misc_feature (828)..(828): n is a, c, g, or t
  nbla-00483-f
ggatctcgngcactgtggcgcctactgggtttagtataagatgtgccattttgtcctctgtatgtctgaatgaagctataacatttgcctttttattgcaggttttcctttggaatatggataaatacaccatgatacggaaactagaaggacatcaccatgatgtggtagcttgtgacttttctcctgatggagcattactggctactgcatcttatgatactcgagtatatatctgggatccacataatggagacattctgatggaatttgggcacctgtttcccccacctactccaatatttgctggaggagcaaatgaccggtgggtacgatctgtatcttttagccatgatggactgcatgttgcaagccttgctgatgataaaatggtgaggttctggagaattgatgaggattatccagtgcaagttgcacctttgagcaatggtctttgctgtgccttctctactgatggcagtgttttagctgctgggacacatgacggaagtgtgtatttttgggccactccacggcaggtccctaacctgcaacatttatgtcgcatgtcaatccgaagagtgatgcccacccaagaagttcangagctgccgattccttccaagcttttggagtttctcccgtatcgtanttanaagattctgccttccctagtaatagggactgacagaatacacttaacacaaacctcaaagctttactgacttcaattaaccgtttttaaagacnttnaagattaattaatttgaaaggtcctggncngcattttgatcaattnncctttaaaatatanttatngncatananttc

SEQ ID NO: 34 - DNA, 874 bp, Homo sapiens
  misc_feature (5)..(13): n is a, c, g, or t
  misc_feature (32)..(32): n is a, c, g, or t
  misc_feature (532)..(532): n is a, c, g, or t
  misc_feature (654)..(654): n is a, c, g, or t
  misc_feature (733)..(733): n is a, c, g, or t
  misc_feature (736)..(736): n is a, c, g, or t
  misc_feature (741)..(741): n is a, c, g, or t
  misc_feature (743)..(743): n is a, c, g, or t
  misc_feature (757)..(757): n is a, c, g, or t
  misc_feature (768)..(768): n is a, c, g, or t
  misc_feature (784)..(784): n is a, c, g, or t
  misc_feature (820)..(820): n is a, c, g, or t
  misc_feature (834)..(834): n is a, c, g, or t
  misc_feature (840)..(840): n is a, c, g, or t
  misc_feature (844)..(844): n is a, c, g, or t
  misc_feature (854)..(854): n is a, c, g, or t
  misc_feature (857)..(857): n is a, c, g, or t
  misc_feature (864)..(864): n is a, c, g, or t
  misc_feature (869)..(870): n is a, c, g, or t
  misc_feature (872)..(872): n is a, c, g, or t
  nbla-00483-r1
gggtnnnnnnnnntggtggccttttttttttnttttttgtatttccagtagagacagggtttcatcatgtttgccaggctagtctcaaactgccgacctcaggtgatttgcccgcctcacccaattcaactttcgtaagtcagtatttaccatctaactcagtgtcccagaatttaaaatttccttgcactttacagcaaagatacatattgtggctctactgaagcaatatatacatgtcagaactaaaaatcagaaaagcaaaagggtccattcaacatatagcagcttatatctaaatatgtacaggtatgtatgttttcacagttagatctttaaaaaaatttatatttgatatgttcaagaaatacttctattgtctataaataatattttaaaagctcaactgatcaaaatgcagtacaagaacatatcaaattaaataaatcttctacgtctttaaaaacagataattgaagtcagtaaagcttgaggtttgtgttaagtgtattctgtcagtccctactactanggaaggcagaatcttctaaatacgatacgggagaaactccaaaagcttggaaggatcggcagctcctgaacttcctgggtgggcatcactcctcggattgacatgcgacataaatgttgcangctaagggacctgccgtggagtgggccaaaaatacacacttccgtcatgtgtcccagcagctaaaacactgccatcaantanagaangnacagcaaagaccantgctcaaaggngcaaccttgcactggntaatcctcatcaattctccaaaacctcaccaatttnacaatcagcaaggnttgcanaatnagtccacaanggntaaaagntacanntngt

SEQ ID NO: 35 - DNA, 879 bp, Homo sapiens
  misc_feature (2)..(5): n is a, c, g, or t
  misc_feature (8)..(12): n is a, c, g, or t
  misc_feature (17)..(18): n is a, c, g, or t
  misc_feature (24)..(24): n is a, c, g, or t
  misc_feature (564)..(564): n is a, c, g, or t
  misc_feature (606)..(606): n is a, c, g, or t
  misc_feature (609)..(609): n is a, c, g, or t
  misc_feature (662)..(662): n is a, c, g, or t
  misc_feature (670)..(670): n is a, c, g, or t
  misc_feature (746)..(746): n is a, c, g, or t
  misc_feature (771)..(771): n is a, c, g, or t
  misc_feature (773)..(773): n is a, c, g, or t
  misc_feature (778)..(778): n is a, c, g, or t
  misc_feature (791)..(791): n is a, c, g, or t
  misc_feature (809)..(809): n is a, c, g, or t
  misc_feature (813)..(813): n is a, c, g, or t
  misc_feature (823)..(823): n is a, c, g, or t
  misc_feature (831)..(831): n is a, c, g, or t
  misc_feature (834)..(835): n is a, c, g, or t
  misc_feature (845)..(845): n is a, c, g, or t
  misc_feature (860)..(860): n is a, c, g, or t
  misc_feature (864)..(864): n is a, c, g, or t
  misc_feature (867)..(867): n is a, c, g, or t
  misc_feature (871)..(871): n is a, c, g, or t
  nbla-00491-f
gnnnnttnnnnnggccnnggatcncgagcacggttggcctactgggtatgaacgaacctccttcagtccaactatccagacgttcattctctctgccatttggcacggggtatacccaggatattatctaacgtttctaacaggggtgttaatgacattagcagcaagagctatgagaaataactttagacattatttcattgaaccttcccaactgaaattattttatgatgttataacatggatagtaactcaagtagcaataagttacacagttgtgccatttgtgcttctttctataaaaccatcactcacgttttacagctcctggtattattgcctgcacattcttggtatcttagtattattgtgttgccagtgaaaaaaactcaaagaagaaagaatacacatgaaaacattcagctctcacaatccaaaaagtttgatgaaggagaaaattctttgggacagaacagtttttctacaacaaacaatgtttgcaatcagaatcaagaaatagcctcgagacattcatcactaaagcagtgatcgggaaggcctganggctgttttttttttttgatgttaacaagaaacctatcttancancttttcaaggggtttgagtttgttgggaaagcaattaactggggggaaatggncagttatngataaggaattcctgtcaccagattgggaatggggtgaaacaagccctccaaggcatgtccccgtggggcacgccntatgttagataattccatatttcantngggantcccaacctcagnacttgtccgtaggggcanaacncgtgccctgntgccgaanggnnggttgcgttncccaagggactgaanaggnggnaaanaaacccgg

SEQ ID NO: 36 - DNA, 892 bp, Homo sapiens
  misc_feature (3)..(3): n is a, c, g, or t
  misc_feature (6)..(11): n is a, c, g, or t
  misc_feature (26)..(26): n is a, c, g, or t
  misc_feature (552)..(552): n is a, c, g, or t
  misc_feature (662)..(662): n is a, c, g, or t
  misc_feature (664)..(664): n is a, c, g, or t
  misc_feature (693)..(693): n is a, c, g, or t
  misc_feature (706)..(706): n is a, c, g, or t
  misc_feature (710)..(710): n is a, c, g, or t
  misc_feature (717)..(717): n is a, c, g, or t
  misc_feature (719)..(719): n is a, c, g, or t
  misc_feature (738)..(738): n is a, c, g, or t
  misc_feature (758)..(758): n is a, c, g, or t
  misc_feature (808)..(809): n is a, c, g, or t
  misc_feature (825)..(825): n is a, c, g, or t
  misc_feature (868)..(868): n is a, c, g, or t
  misc_feature (890)..(890): n is a, c, g, or t
  nbla-00491-r1
ggntgnnnnnntggggcttttttttnggcttttgtgagacggagtcttcctctgtcacccgggctggagtgcagtggcacaattttagctcactgcaacctccacctcccaggttcaagcaattctcctgcctcagcctcccaagtagctgggattacaggtgtgcgccaccatgcccgtctaatttttgtgttttcagtagagacggggattcaccacgttggccaggctggtctccaactcctgacctcaagtgatccgcccacctcggcctcccaaagtgctaggattacaggtgtgagccaccatgctcagccaacataatttcaatgcatgggaaaacagaggaaatttatttagttatcaatcctttcctgggtagggttagccttatcagccggaaaacacttacttttagataaataaaaatagattaggatatttctaaacttcaaaaaagacacatgcccatttttgctgagacctcaaaagctgcaagtgcatttgcttttcctttcctccttaaaatgaagtatatatagcataagccanatggttgccttgtcttaacttcatttgcaaatttattaagtgactccaacccccgaaaaaaagagagagagaacccatcacaagaaaattgcattcattaaaaatttaangnaaaaagtaaaaagtaagttccatacatangtcaaacaaaggngaantcaaaangntttgcccctcccctcctanaagggaaggaggtaaatccnggggctgaggcactccaatggcctggatcaaatcccatcctcggcttcanntcctggtggcaacaanagtcctccgttgggattccaaggaaatgcttataatccaaggnaagattagttgtgggaaaaaangg

SEQ ID NO: 37 - DNA, 1784 bp, Homo sapiens
  misc_feature (2)..(2): n is a, c, g, or t
  misc_feature (4)..(5): n is a, c, g, or t
  misc_feature (7)..(11): n is a, c, g, or t
  misc_feature (17)..(17): n is a, c, g, or t
  misc_feature (610)..(610): n is a, c, g, or t
  misc_feature (665)..(665): n is a, c, g, or t
  misc_feature (700)..(700): n is a, c, g, or t
  misc_feature (731)..(731): n is a, c, g, or t
  misc_feature (739)..(739): n is a, c, g, or t
  misc_feature (771)..(771): n is a, c, g, or t
  misc_feature (805)..(805): n is a, c, g, or t
  misc_feature (823)..(823): n is a, c, g, or t
  misc_feature (838)..(838): n is a, c, g, or t
  misc_feature (840)..(840): n is a, c, g, or t
  misc_feature (844)..(844): n is a, c, g, or t
  misc_feature (860)..(860): n is a, c, g, or t
  misc_feature (869)..(869): n is a, c, g, or t
  misc_feature (875)..(875): n is a, c, g, or t
  misc_feature (887)..(887): n is a, c, g, or t
  misc_feature (893)..(893): n is a, c, g, or t
  misc_feature (897)..(898): n is a, c, g, or t
  misc_feature (900)..(905): n is a, c, g, or t
  misc_feature (941)..(941): n is a, c, g, or t
  misc_feature (1389)..(1389): n is a, c, g, or t
  misc_feature (1535)..(1535): n is a, c, g, or t
  misc_feature (1567)..(1567): n is a, c, g, or t
  misc_feature (1619)..(1619): n is a, c, g, or t
  misc_feature (1630)..(1630): n is a, c, g, or t
  misc_feature (1634)..(1634): n is a, c, g, or t
  misc_feature (1636)..(1636): n is a, c, g, or t
  misc_feature (1638)..(1638): n is a, c, g, or t
  misc_feature (1645)..(1645): n is a, c, g, or t
  misc_feature (1710)..(1710): n is a, c, g, or t
  misc_feature (1719)..(1719): n is a, c, g, or t
  misc_feature (1742)..(1742): n is a, c, g, or t
  misc_feature (1760)..(1760): n is a, c, g, or t
  nbla-00494-f
gngnntnnnnngggccnggatctcgagcactgtggccctactggagagtgtggagcgtggagcgccgggactgtgcacgcttgaccggaagcccagaccagtgcggtcctagccagagagaaaggacatttgccaacaatgagacacgaagcgcccatgcagatggcctctgcccaagatgccaggtacggccagaaagactcctctgatcagaactttgactacatgttcaaattactcatcatcggcaatagcagtgtggggaaaacatcttttctattccgttatgcagatgactcctttacatctgcattcgtcagcacagttgggatcgatttcaaagtaaaaactgtattcaaaaatgaaaagagaatcaagcttcagatttgggacacagcaggccaggaaagatacaggactatcaccacagcctattatcgtggagccatgggctttattttaatgtatgacattacaaatgaagaatccttcaatgcagtacaagattggtcaactcaaatcaaaacatactcttgggacaatgcccaagttattctggttgggaacaagtgtgacatggaagacgagcgggtcatctcaactgagcgangtcaacatttaggagaacagcttgggtttgagttttttgaaacaagtgccaaggncaacattaatgtcaagcaagacattttgagcgccntgtgggtatcatctgcgacaaaatgtcaganaatttggngactgattctgccatcactgctgcaaagcaanaacacgaagactcaagggaactcctcctcaacgnaacccaactgtgcctgcnaatgtccccgtgcananaggnaactccagggggtccnggttccaanaaacanaatttttaatdnahmsansggnngnnnnnntgtgggctttttttggcctttttttttatagtctcntagatatttattgtaatcttcaagaaataaaacaaactcaaagaacaaaaaccactttctttatagaattcacatacaaactgaatacctaatagagcacataccatttttacacaattaatttcaataaagataattaaaacttcacaatgtgaatacacttcatagctttaaacccacacaagagctcctgtggacacatgaagagtcacaatatttgctatgcagcagtagttttcaactaaatgtcggtcactatatgaaagcattaagctgttttcaatattttcttaagaagagttccacagtgcagtcactgagaaggggccaaatgtgcctggttccaaaggaagatcttcatctgtgcatttccaatgccctttatgggaaacatggagctacaagaaaaatctctgggtacacatctgccaagtggcattaggtcggncaatctctcatgggttggtgcactggcaaatgtctaaatcaactgccgtaatatggcattaaagcaatttgcataatggggctgagtcctgagctgctcaacacaagaggaatatgataatgcaacaagcttgtcctcctcacggngactaaaaggtagggagctaaactggggtaanttgaatgggttcaaaggggcaatttggctgtcctaagaaaacaatgatctanaactgataacnttgncncncctccantcaaagggaacataactgtggccttcccacttaatttcctggaaaaactcctcactactaaatcnttccgggantaagtttggcccctcaaaggggncctctctgaatcctcaanttctaaagggccccaatcccggtg

SEQ ID NO: 38 - DNA, 890 bp, Homo sapiens
  misc_feature (3)..(4): n is a, c, g, or t
  misc_feature (6)..(11): n is a, c, g, or t
  misc_feature (47)..(47): n is a, c, g, or t
  misc_feature (495)..(495): n is a, c, g, or t
  misc_feature (641)..(641): n is a, c, g, or t
  misc_feature (673)..(673): n is a, c, g, or t
  misc_feature (725)..(725): n is a, c, g, or t
  misc_feature (736)..(736): n is a, c, g, or t
  misc_feature (740)..(740): n is a, c, g, or t
  misc_feature (742)..(742): n is a, c, g, or t
  misc_feature (744)..(744): n is a, c, g, or t
  misc_feature (751)..(751): n is a, c, g, or t
  misc_feature (816)..(816): n is a, c, g, or t
  misc_feature (825)..(825): n is a, c, g, or t
  misc_feature (848)..(848): n is a, c, g, or t
  misc_feature (866)..(866): n is a, c, g, or t
  nbla-00494-r1
ggnngnnnnnntgtgggctttttttggcctttttttttatagtctcntagatatttattgtaatcttcaagaaataaaacaaactcaaagaacaaaaaccactttctttatagaattcacatacaaactgaatacctaatagagcacataccatttttacacaattaatttcaataaagataattaaaacttcacaatgtgaatacacttcatagctttaaacccacacaagagctcctgtggacacatgaagagtcacaatatttgctatgcagcagtagttttcaactaaatgtcggtcactatatgaaagcattaagctgttttcaatattttcttaagaagagttccacagtgcagtcactgagaaggggccaaatgtgcctggttccaaaggaagatcttcatctgtgcatttccaatgccctttatgggaaacatggagctacaagaaaaatctctgggtacacatctgccaagtggcattaggtcggncaatctctcatgggttggtgcactggcaaatgtctaaatcaactgccgtaatatggcattaaagcaatttgcataatggggctgagtcctgagctgctcaacacaagaggaatatgataatgcaacaagcttgtcctcctcacggngactaaaaggtagggagctaaactggggtaanttgaatgggttcaaaggggcaatttggctgtcctaagaaaacaatgatctanaactgataacnttgncncncctccantcaaagggaacataactgtggccttcccacttaatttcctggaaaaactcctcactactaaatcnttccgggantaagtttggcccctcaaaggggncctctctgaatcctcaanttctaaagggccccaatcccggtg

SEQ ID NO: 39 - DNA, 862 bp, Homo sapiens
  misc_feature (2)..(3): n is a, c, g, or t
  misc_feature (5)..(5): n is a, c, g, or t
  misc_feature (8)..(12): n is a, c, g, or t
  misc_feature (17)..(18): n is a, c, g, or t
  misc_feature (38)..(38): n is a, c, g, or t
  misc_feature (598)..(598): n is a, c, g, or t
  misc_feature (614)..(614): n is a, c, g, or t
  misc_feature (646)..(646): n is a, c, g, or t
  misc_feature (655)..(655): n is a, c, g, or t
  misc_feature (705)..(705): n is a, c, g, or t
  misc_feature (724)..(725): n is a, c, g, or t
  misc_feature (743)..(743): n is a, c, g, or t
  misc_feature (781)..(781): n is a, c, g, or t
  misc_feature (785)..(785): n is a, c, g, or t
  misc_feature (789)..(789): n is a, c, g, or t
  misc_feature (792)..(793): n is a, c, g, or t
  misc_feature (795)..(795): n is a, c, g, or t
  misc_feature (797)..(797): n is a, c, g, or t
  misc_feature (799)..(799): n is a, c, g, or t
  misc_feature (802)..(805): n is a, c, g, or t
  misc_feature (824)..(824): n is a, c, g, or t
  misc_feature (852)..(852): n is a, c, g, or t
  misc_feature (857)..(857): n is a, c, g, or t
  misc_feature (861)..(861): n is a, c, g, or t
  nbla-00499-f
gnngnttnnnnnggccnnggatcctcgagcactgtggncctactgggtttaacttgcaccaagcaagaaaatataaatacagttaactgcattaagataatcacgttaaaattgttactatgcagcacagaacttcattcttatagtattcttgggttcaacctttgaatcaattttaccactgatttaataaatgactcaaagacatctgtaagtcatgctgctgtgttttgaaagtctttaactaaattaagattgcagaatgatagtgattattcaattagattttaagtaaggattgtgatattagaggctggaaatccttattttttaaaaaatcagataggcataaatagttaaatcactttcattctccccaaacctgtagttacagaaaaagttttatgctagaggtgggatgccaagttttcactatccatgaagcagcgctgcatgtcactaggtaacacagattcatccagatggtgtttacatttgatttaattgggatcttattgacatcaggtatacttgggaagacatttcctttatcctcagtgtatgaatttaaagctatttttgtaaatattctaatcancgataattctacctangttctcaaccaacttaaccagtttgttttcanagcctgtantctaatgggaaccaatttatcagtgcgccttaatgatgtggattttgcanacatcaaacattaccacannttcacaagtgcacctaanttcaccattaacttaatcccaagtcaatttttcccggncacncaancanngntntnttnnnnacttttgaaaagccggaanactttgctcaaaatgggaaggttaaatnaggtnaaanc

SEQ ID NO: 40 - DNA, 888 bp, Homo sapiens
  misc_feature (3)..(4): n is a, c, g, or t
  misc_feature (6)..(11): n is a, c, g, or t
  misc_feature (48)..(48): n is a, c, g, or t
  misc_feature (54)..(54): n is a, c, g, or t
  misc_feature (547)..(547): n is a, c, g, or t
  misc_feature (688)..(688): n is a, c, g, or t
  misc_feature (778)..(778): n is a, c, g, or t
  misc_feature (804)..(804): n is a, c, g, or t
  misc_feature (813)..(813): n is a, c, g, or t
  misc_feature (874)..(874): n is a, c, g, or t
  misc_feature (881)..(881): n is a, c, g, or t
  nbla-00499-r1
ggnngnnnnnntgtgggcttttttttggcctcctttttaacatgtatntctcanaataagattcaccatgaacattattttagatatttttacatcttctttagctaaccaagtgaaaaatccaatatacacaaataggtactttcatcagtacataaaacagcaataggtagcaaggttagaaatcagaatacaagttcaattgaataaatacaatactagtacagagacacccatttttaacccacaatgaaaaatctgagccatgaataggttttccattttgaatctaacttctagatgatctgtattttgaccttaaaggggccaaaatatttaatatgggtgaagctcatgttccattacccgtaaaggtctaatgcaacagaaaaatggtcattttacattggttagaatttttaactaggtctttcatattattttgtttaagcacatgacagacttatacacatattttaaaaaatcaaacatgggatttctatatacatcaaacctttaacaatgtctgtctctgaattgctattanagtgttcaaaattatacaaacaaacatccagtaaacagcattttattttatgacactctgtgttaatacaataaatatacaaaacttccaacccactgaaacatgcaacattagagggacacatgggagggcatttctgtngaaccatgacagtcaccatgatggcagcgcaatataagttactgacaaatattcaaacatctctagataaataatccaagtcccaaattncaaatcactgagtaatgactttccgnggtcaaacnttagtttggaataaaattgcaataattaatattccaaaatggtaatggcacggtgactgcngttgaanccatttt

SEQ ID NO: 41 - DNA, 923 bp, Homo sapiens
  misc_feature (2)..(2): n is a, c, g, or t
  misc_feature (4)..(4): n is a, c, g, or t
  misc_feature (7)..(7): n is a, c, g, or t
  misc_feature (9)..(11): n is a, c, g, or t
  misc_feature (22)..(23): n is a, c, g, or t
  misc_feature (51)..(51): n is a, c, g, or t
  misc_feature (59)..(59): n is a, c, g, or t
  misc_feature (204)..(204): n is a, c, g, or t
  misc_feature (357)..(358): n is a, c, g, or t
  misc_feature (393)..(393): n is a, c, g, or t
  misc_feature (405)..(405): n is a, c, g, or t
  misc_feature (407)..(407): n is a, c, g, or t
  misc_feature (410)..(410): n is a, c, g, or t
  misc_feature (413)..(414): n is a, c, g, or t
  misc_feature (417)..(417): n is a, c, g, or t
  misc_feature (434)..(434): n is a, c, g, or t
  misc_feature (440)..(440): n is a, c, g, or t
  misc_feature (443)..(444): n is a, c, g, or t
  misc_feature (446)..(446): n is a, c, g, or t
  misc_feature (448)..(448): n is a, c, g, or t
  misc_feature (469)..(469): n is a, c, g, or t
  misc_feature (472)..(474): n is a, c, g, or t
  misc_feature (488)..(488): n is a, c, g, or t
  misc_feature (492)..(492): n is a, c, g, or t
  misc_feature (496)..(496): n is a, c, g, or t
  misc_feature (500)..(500): n is a, c, g, or t
  misc_feature (503)..(503): n is a, c, g, or t
  misc_feature (507)..(507): n is a, c, g, or t
  misc_feature (517)..(517): n is a, c, g, or t
  misc_feature (520)..(521): n is a, c, g, or t
  misc_feature (526)..(527): n is a, c, g, or t
  misc_feature (529)..(529): n is a, c, g, or t
  misc_feature (538)..(538): n is a, c, g, or t
  misc_feature (540)..(540): n is a, c, g, or t
  misc_feature (550)..(551): n is a, c, g, or t
  misc_feature (553)..(553): n is a, c, g, or t
  misc_feature (559)..(559): n is a, c, g, or t
  misc_feature (569)..(569): n is a, c, g, or t
  misc_feature (575)..(576): n is a, c, g, or t
  misc_feature (584)..(584): n is a, c, g, or t
  misc_feature (587)..(587): n is a, c, g, or t
  misc_feature (601)..(601): n is a, c, g, or t
  misc_feature (606)..(606): n is a, c, g, or t
  misc_feature (611)..(615): n is a, c, g, or t
  misc_feature (622)..(622): n is a, c, g, or t
  misc_feature (625)..(625): n is a, c, g, or t
  misc_feature (628)..(629): n is a, c, g, or t
  misc_feature (651)..(651): n is a, c, g, or t
  misc_feature (662)..(662): n is a, c, g, or t
  misc_feature (666)..(666): n is a, c, g, or t
  misc_feature (673)..(673): n is a, c, g, or t
  misc_feature (675)..(677): n is a, c, g, or t
  misc_feature (679)..(679): n is a, c, g, or t
  misc_feature (684)..(684): n is a, c, g, or t
  misc_feature (696)..(696): n is a, c, g, or t
  misc_feature (699)..(699): n is a, c, g, or t
  misc_feature (704)..(704): n is a, c, g, or t
  misc_feature (706)..(706): n is a, c, g, or t
  misc_feature (711)..(711): n is a, c, g, or t
  misc_feature (713)..(713): n is a, c, g, or t
  misc_feature (718)..(719): n is a, c, g, or t
  misc_feature (721)..(721): n is a, c, g, or t
  misc_feature (725)..(727): n is a, c, g, or t
  misc_feature (731)..(731): n is a, c, g, or t
  misc_feature (733)..(733): n is a, c, g, or t
  misc_feature (741)..(741): n is a, c, g, or t
  misc_feature (746)..(746): n is a, c, g, or t
  misc_feature (749)..(750): n is a, c, g, or t
  misc_feature (753)..(753): n is a, c, g, or t
  misc_feature (755)..(755): n is a, c, g, or t
  misc_feature (758)..(758): n is a, c, g, or t
  misc_feature (764)..(764): n is a, c, g, or t
  misc_feature (766)..(767): n is a, c, g, or t
  misc_feature (771)..(774): n is a, c, g, or t
  misc_feature (776)..(776): n is a, c, g, or t
  misc_feature (783)..(783): n is a, c, g, or t
  misc_feature (787)..(789): n is a, c, g, or t
  misc_feature (791)..(791): n is a, c, g, or t
  misc_feature (794)..(794): n is a, c, g, or t
  misc_feature (797)..(797): n is a, c, g, or t
  misc_feature (799)..(799): n is a, c, g, or t
  misc_feature (803)..(804): n is a, c, g, or t
  misc_feature (806)..(809): n is a, c, g, or t
  misc_feature (813)..(813): n is a, c, g, or t
  misc_feature (816)..(816): n is a, c, g, or t
  misc_feature (823)..(823): n is a, c, g, or t
  misc_feature (825)..(827): n is a, c, g, or t
  misc_feature (833)..(834): n is a, c, g, or t
  misc_feature (836)..(836): n is a, c, g, or t
  misc_feature (839)..(840): n is a, c, g, or t
  misc_feature (846)..(846): n is a, c, g, or t
  misc_feature (852)..(853): n is a, c, g, or t
  misc_feature (862)..(865): n is a, c, g, or t
  misc_feature (867)..(867): n is a, c, g, or t
  misc_feature (875)..(875): n is a, c, g, or t
  misc_feature (881)..(881): n is a, c, g, or t
  misc_feature (886)..(887): n is a, c, g, or t
  misc_feature (891)..(892): n is a, c, g, or t
  misc_feature (898)..(900): n is a, c, g, or t
  misc_feature (907)..(910): n is a, c, g, or t
  misc_feature (913)..(914): n is a, c, g, or t
  nbla-00536-f
gngntgntnnntggaggttcannggcccaggatctcttaaacgggccctantggatttnaacccaagcattctgattcctgggatgagccattagagctgttcagaagtggaatgggctgtcttttaggacagtgctcctctcttctttccgggtcgctgccagcaagtacggagagaggagctatgactttaaggtcttagantttgtggaatgcagttactccccatttggccaaaatctcagaatttgtgtcgtgtctctaaaccagataaatggagagtactaaaagcattgttgcttctgctctgaaattgttataggattatttttattgcatccaagtcttaaacactgnnatggctggggatgggttctttctacgaatatgtangtcctgagcatngncgngtnncanacagccctgtgatcagnggagcnttnncngngtgagatatgtccatgtacantgnnngggcaccagacgtncatngagnattntcnagtngctcctgtgnacnncaatnnantcactcaangntactcctganngnagtctnttaccttgantttacnngagtatanggntggttgggaaaatngcttncaaannnnngggcatngtnttnnatggaatgcagatgatgtttgnaacatgtgctnatgnagggaangnnntnacacnctcaatgttggnagnattgntntctantnggtcnntntcannnttgngngagtcctntgacngcnngtncnatncgtcanannatgnnnngnccatcantttnnngnagncancngtgnntnnnntaanttngaggtangnnntgctanncnatnnctgtanacatgnnggcgatcgnnnngntgacttcntcacanttacnncatnnttttcnnngcgttannnnatnngccccagtg

SEQ ID NO: 42 - DNA, 877 bp, Homo sapiens
  misc_feature (2)..(2): n is a, c, g, or t
  misc_feature (7)..(7): n is a, c, g, or t
  misc_feature (10)..(10): n is a, c, g, or t
  misc_feature (16)..(16): n is a, c, g, or t
  misc_feature (23)..(24): n is a, c, g, or t
  misc_feature (43)..(43): n is a, c, g, or t
  misc_feature (59)..(59): n is a, c, g, or t
  misc_feature (74)..(74): n is a, c, g, or t
  misc_feature (203)..(204): n is a, c, g, or t
  misc_feature (229)..(229): n is a, c, g, or t
  misc_feature (290)..(290): n is a, c, g, or t
  misc_feature (295)..(295): n is a, c, g, or t
  misc_feature (317)..(317): n is a, c, g, or t
  misc_feature (325)..(325): n is a, c, g, or t
  misc_feature (336)..(336): n is a, c, g, or t
  misc_feature (381)..(381): n is a, c, g, or t
  misc_feature (393)..(393): n is a, c, g, or t
  misc_feature (401)..(401): n is a, c, g, or t
  misc_feature (407)..(409): n is a, c, g, or t
  misc_feature (432)..(432): n is a, c, g, or t
  misc_feature (435)..(435): n is a, c, g, or t
  misc_feature (442)..(442): n is a, c, g, or t
  misc_feature (460)..(460): n is a, c, g, or t
  misc_feature (463)..(463): n is a, c, g, or t
  misc_feature (477)..(477): n is a, c, g, or t
  misc_feature (488)..(488): n is a, c, g, or t
  misc_feature (502)..(502): n is a, c, g, or t
  misc_feature (529)..(529): n is a, c, g, or t
  misc_feature (535)..(535): n is a, c, g, or t
  misc_feature (539)..(539): n is a, c, g, or t
  misc_feature (548)..(548): n is a, c, g, or t
  misc_feature (557)..(557): n is a, c, g, or t
  misc_feature (572)..(572): n is a, c, g, or t
  misc_feature (585)..(586): n is a, c, g, or t
  misc_feature (589)..(589): n is a, c, g, or t
  misc_feature (608)..(608): n is a, c, g, or t
  misc_feature (618)..(618): n is a, c, g, or t
  misc_feature (620)..(620): n is a, c, g, or t
  misc_feature (624)..(624): n is a, c, g, or t
  misc_feature (630)..(630): n is a, c, g, or t
  misc_feature (639)..(639): n is a, c, g, or t
  misc_feature (641)..(641): n is a, c, g, or t
  misc_feature (643)..(643): n is a, c, g, or t
  misc_feature (649)..(650): n is a, c, g, or t
  misc_feature (653)..(655): n is a, c, g, or t
  misc_feature (676)..(676): n is a, c, g, or t
  misc_feature (679)..(680): n is a, c, g, or t
  misc_feature (684)..(684): n is a, c, g, or t
  misc_feature (686)..(686): n is a, c, g, or t
  misc_feature (695)..(696): n is a, c, g, or t
  misc_feature (702)..(702): n is a, c, g, or t
  misc_feature (704)..(704): n is a, c, g, or t
  misc_feature (707)..(707): n is a, c, g, or t
  misc_feature (730)..(730): n is a, c, g, or t
  misc_feature (739)..(739): n is a, c, g, or t
  misc_feature (742)..(742): n is a, c, g, or t
  misc_feature (749)..(750): n is a, c, g, or t
  misc_feature (757)..(757): n is a, c, g, or t
  misc_feature (759)..(759): n is a, c, g, or t
  misc_feature (763)..(763): n is a, c, g, or t
  misc_feature (766)..(766): n is a, c, g, or t
  misc_feature (769)..(769): n is a, c, g, or t
  misc_feature (773)..(773): n is a, c, g, or t
  misc_feature (778)..(778): n is a, c, g, or t
  misc_feature (783)..(783): n is a, c, g, or t
  misc_feature (802)..(802): n is a, c, g, or t
  misc_feature (807)..(807): n is a, c, g, or t
  misc_feature (811)..(811): n is a, c, g, or t
  misc_feature (813)..(813): n is a, c, g, or t
  misc_feature (817)..(818): n is a, c, g, or t
  misc_feature (825)..(825): n is a, c, g, or t
  misc_feature (830)..(830): n is a, c, g, or t
  misc_feature (835)..(835): n is a, c, g, or t
  misc_feature (837)..(837): n is a, c, g, or t
  misc_feature (842)..(842): n is a, c, g, or t
  misc_feature (845)..(845): n is a, c, g, or t
  misc_feature (852)..(852): n is a, c, g, or t
  misc_feature (860)..(862): n is a, c, g, or t
  misc_feature (869)..(869): n is a, c, g, or t
  nbla-00536-r1
gngtggnttngtgggncttttcnnagcgccttgctttgactanacatcgcacttggccngtaataggaaatcanatcatccagaatttaaaaagtgactgtgggggcttgttgtcagctgtcgggggcaggacttatgtgcagagctaggtccgtggctctggtcaaggcactgccttgggtcactctgtgctggcccaggcnngctccatgcctggctgctggataanccagttctcttctgacccccaaagcaatccaatggtggggcaaactcaggatctctctcancccanagatctgactgatgaggcatangtttttanctatttgtaanaaaatgaaagtatctcatactaccattgacacagccaggtggganggggtcactggngaaacgcnaactgnnnctgcccatgggatggaacctcgncanggtttangccctttgcagtgggaanganctggtccctcctcntcctggtgtanaacctgagattcantctttcaagtgggaagaagcactggancatggnacantgtcccaanggagagttntgtttccccttttcntctttttcacccnntanaaccctgtcttctcaccantcacaatgtncngtgnaccctnaattttcantngncatggnncannnaaccctgtcctatatttgaanctnnaggnanattcctgtnnaccagngnatnttggtgattttgcccctaggaanttttcaganggncattttnntgggtangncttngcnaancaanccggnttttntcctgggcttttcggcaantaacntttngntccnnacctttntgatnttatncnattcngtngtcacanactacctnnnggtcttnatcagctt

SEQ ID NO: 43 - DNA, 2105 bp, Homo sapiens
  nbla-00538
tggcctactgctagcaaaacttgtttagcttagcaaaaacaaacacacaaaaaaactgagaactctgctgtttcagatatgccataacatacatctgaaacacatgtgtaacaatcaaaatggtgggctctagaatggttttggagctcgagatcttcatgggttagacttgctggtcagacccaggagcacctgtggctcacaccttctgttcccctcctggcctgtgcagaatgtaaacagcagactcatactcaatgggcactacaggccttatcagacgttttatacaagcctggattgcttagtaggggaataaggcattctctgagggggctttccacttagattgagaattttatttgaaaagaatctggtttaaatggcattgtggtccgaggtagctgctctccccactgagagctgagccgaaatataagaataatatatttgtgcttcgagttggtgtttctttcagtgtaatgcatgcagtggtcacaacccagttactcataatatttggattgtatttgttcgtagatatgcccagaagactagagaattagtgttatataccatatagaacttactgtcagtcaactataaacaggcccaattaaaaactgttccattactacgcaaacacatattagaggcctttgctgatgacacattagctggatcttagccaccccagaaagggtttgatttgaagctgattgttgccagatatgcatattggaatcccatctacccatagttcctctgaaggtgattttgtaatttgcaaaagggtataggaaaatatacctaaaagcgaatttgtggctgagaggataaacagaagctgtttgctcatgttctgtgccccacacccaccaatacctaaatctgttaaggaagacagaaaatgttttctttgtgctcattgagtagttccagacagaagaagaatatactctttaaaatgtatttacctgttagctggaagtacccagaattatcagaaacgaatgcaaaaaaaaaaaaaaaaaaaaaaagcttacacagcttcttagcaatttttttttttttttgccgaaacaataaattgcctttagcagcagtttaaaatcctatcgtgaacaacctatattttcgccattttacaatggagagttgtgacaagtacaggttatcaagtttgcacttaactatgccaaaaaaagtttgaagcgctctattctcagacatgctgtattattacttctcattcaagattgaaaaatataaaggtatccaaactctgtcttaatgtaaatgtaactatttttccttcaagtgttgactagggagtcggtttctctcttaaagacactcactgtacaactgaaagcagctgtcatatttctggcaaaatgtgtttacgtatctgacaagttgtacatttgtgtatgaactgacataaaatgtgaaagcctgtaagtgtacatgtagtggtgtggtgttctgtctagaggatacaactgaatgtttttaatttgctgacttacagacacaggctgtttacaaaatgctagctggaaagtctgtaatgttcatgtcataacttttagttaattgccattgagcacctgttctgaggaggtgagatgtggacttgtgcttataaactggagagtttagtcataatccctcctggctttgtgtgaatagcttgctcactttgctggcctttgaaatgtgttctccgtgataagctatccatgtgtttgtgataagagtgcttgtcaaccatgaccatctttgagccttcctagtcctccacctggcacagtatttgaaatggcaaaggatgtgcttcatcctctaacaaacagtgtacactcccagagctgatattctggattgtgactgtgcacatttcctctagttcatgtctgtagtccctatagaatgatctgtaataaaatagtatactggactgtgcatcaaagggatgtaaaattacagtattccaaaggttgaagttctgctgttttgttataatgcctgatacacatcttgaataaagtcttaacatttttcttttaaaaaaaaaaaaaaaaaaaggccacatgtgctcg

SEQ ID NO: 44 - DNA, 863 bp, Homo sapiens
  misc_feature (2)..(11): n is a, c, g, or t
  misc_feature (14)..(17): n is a, c, g, or t
  misc_feature (701)..(701): n is a, c, g, or t
  misc_feature (778)..(778): n is a, c, g, or t
  misc_feature (782)..(782): n is a, c, g, or t
  misc_feature (863)..(863): n is a, c, g, or t
  nbla-00543-f
gnnnnnnnnnnggnnnnggatctcgagcactgtggcgcctactgggacctttcggcgacctcagatagacccagctgttgaaggatttattcgagacaaatatgagaagaagaaatacatggaccgaagtctggacatcaatgcctttaggaaagaaaaagatgacaagtggaaaagagggagcgaaccagttccagaaaaaaaattggaacctgttgtttttgagaaggtgaaaatgccacagaaaaaagaagacccacagctacctcggaaaagctccccgaaatccacagcgcctgtcatggatttgttgggccttgatgctcctgtggcctgctccattgcaaatagtaagaccagcaataccctagagaaggatttagatctgttggcctctgttccatcccctttttcttcgggttccagaaaggttgtaggttccatgccaactgcagggagtgccggctctgttcctgaaaatctgaacctgtttccggagccagggagcaaatcagaagaaataggcaagaaacagctctctaaagactccattctttcactgtatggattccaaacgcctcaaatgcctactcaagcaatgttcatggctcccgctcagatggatatcccacaagcctaccccagcttccccggggttacacctcctaacagcataatggggagcatgatgcctccaccantaggcatggttgctcaaccaaggaacttctggcatgcaggcatcaatgatgggtgtgccgaatggaatgatgaccanccancaagctggtacatggcaagcatggaactatgccccaaactgtgtatggggccaaccaactcaacaactgcaatggaacttn

SEQ ID NO: 45 - DNA, 874 bp, Homo sapiens
  misc_feature (2)..(2): n is a, c, g, or t
  misc_feature (4)..(4): n is a, c, g, or t
  misc_feature (7)..(12): n is a, c, g, or t
  misc_feature (32)..(34): n is a, c, g, or t
  misc_feature (572)..(572): n is a, c, g, or t
  misc_feature (589)..(589): n is a, c, g, or t
  misc_feature (601)..(601): n is a, c, g, or t
  misc_feature (606)..(606): n is a, c, g, or t
  misc_feature (630)..(630): n is a, c, g, or t
  misc_feature (639)..(639): n is a, c, g, or t
  misc_feature (685)..(685): n is a, c, g, or t
  misc_feature (687)..(687): n is a, c, g, or t
  misc_feature (692)..(692): n is a, c, g, or t
  misc_feature (713)..(713): n is a, c, g, or t
  misc_feature (716)..(716): n is a, c, g, or t
  misc_feature (764)..(764): n is a, c, g, or t
  misc_feature (812)..(812): n is a, c, g, or t
  misc_feature (824)..(824): n is a, c, g, or t
  misc_feature (844)..(844): n is a, c, g, or t
  misc_feature (862)..(862): n is a, c, g, or t
  nbla-00543-r1
gngntgnnnnnntgtgggctttttttttggcnnnttttttttttttccctgcaatatttattaaggaatttacacatacacaggagaaaggcagccaggaactgtggttcccacacatgaaatcttttaagcaaagttttcttgtctgaattttcaagtggggtgaacaatgactgagaggaaagctgtcccggccctctgcctcgtacacctgggaacggtggggaaacagagcaccctggatacacaggcatgaaagagtgatcagcagaccgggagaagggaagggagaaagggagttatcaatgacatggcgttttttaaaccataagaaaaacacaacagttttaggctgctgataaattaattcctctctgttgtaaacctaaaactaaacaaaaacaaaaatacccagagcagatggggaaagggtgggaggcggaacacacactcatacacacacacacactcacgcacacacacaagcagtacacgttaagctctgcattcccactataggggttggtcctccagccacggagccagattctactgaaggcaagggggaagcnggaagggatgtgtgtcngtgtgtgggatnttcanaaagtccttggggctaataaaggntgactgaancaacaagtcctgaaaccccaaattcaaaaagcaactcaaggcgaananagtantaattttgctcatcctcatanganggggcttgcctcaacccaaggctaaggtcaaactgacccaagacccanggagtattaatttgatttcaatacttgcttcaatcccataaatcatgngaacatgatgcntttcaaatttaaacactttnaacaactttttacacatnttgaagggccct

SEQ ID NO: 46 - DNA, 898 bp, Homo sapiens
  misc_feature (2)..(3): n is a, c, g, or t
  misc_feature (5)..(6): n is a, c, g, or t
  misc_feature (8)..(12): n is a, c, g, or t
  misc_feature (24)..(28): n is a, c, g, or t
  misc_feature (33)..(34): n is a, c, g, or t
  misc_feature (36)..(37): n is a, c, g, or t
  misc_feature (680)..(680): n is a, c, g, or t
  misc_feature (749)..(749): n is a, c, g, or t
  misc_feature (786)..(786): n is a, c, g, or t
  misc_feature (788)..(788): n is a, c, g, or t
  misc_feature (794)..(794): n is a, c, g, or t
  misc_feature (835)..(835): n is a, c, g, or t
  misc_feature (848)..(848): n is a, c, g, or t
  misc_feature (864)..(864): n is a, c, g, or t
  nbla-00547-f
gnngnngnnnnntgtggctttttnnnnnggccnngnnctcgatcacgtgggcctactgtggtgagagacggaccgagaccggagatgttttcaagcccgggctccggcggctttacaggcggctgcagcggcgacgaagacaacgacagcgacggctacgccgaagcactcgttccgggggtgaagcctcctgcgccggccttgcctcggatccaggatgagaagactgataaaagaagaagctagctgaacagctgtaaaatgcccaaatctgggttcacagaaccaattcagagtgaaaattctgacagtgacagcaatatggtagagaaaccatatggaagaaagagtaaagacaagattgcatcctacagcaaaactccaaaaattgaacgaagtgatgtgagcaaggagatgaaagagaaatcatccatgaaacgtaaacttccttttactattagcccatcaagaaatgaagaacgagattcagacacagattcagattcaggacatacaagtgaaaattggggggagagacttatatcttcttacaggacatactcagagaaagaaggtccagaaaagaagaagacaaaaaaggaagctggaaataagaaatccacaccaattagcattccttttggttatccactctctgagcgaaaacagatggcacttcntatgcagatgacagcaagagacaacaatccagattccacaccaaatcatccatcacaaacaacgcctgnccaaaagaaaactcccaattcttcatctcgacagaangntaaagntaataaaagaaatgaacgtggggaaactccttacacatggntgcaatccagganatgtgaacaagttaangaattataagtttagggcaaatttaatgttaaaa

SEQ ID NO: 47 - DNA, 840 bp, Homo sapiens
  misc_feature (4)..(4): n is a, c, g, or t
  misc_feature (7)..(11): n is a, c, g, or t
  misc_feature (26)..(27): n is a, c, g, or t
  misc_feature (29)..(29): n is a, c, g, or t
  misc_feature (36)..(36): n is a, c, g, or t
  misc_feature (43)..(43): n is a, c, g, or t
  misc_feature (59)..(59): n is a, c, g, or t
  misc_feature (135)..(135): n is a, c, g, or t
  misc_feature (482)..(482): n is a, c, g, or t
  misc_feature (612)..(612): n is a, c, g, or t
  misc_feature (638)..(638): n is a, c, g, or t
  misc_feature (642)..(642): n is a, c, g, or t
  misc_feature (655)..(655): n is a, c, g, or t
  misc_feature (683)..(683): n is a, c, g, or t
  misc_feature (699)..(699): n is a, c, g, or t
  misc_feature (726)..(726): n is a, c, g, or t
  misc_feature (732)..(732): n is a, c, g, or t
  misc_feature (738)..(738): n is a, c, g, or t
  misc_feature (743)..(743): n is a, c, g, or t
  misc_feature (754)..(754): n is a, c, g, or t
  misc_feature (765)..(765): n is a, c, g, or t
  misc_feature (774)..(774): n is a, c, g, or t
  misc_feature (782)..(782): n is a, c, g, or t
  misc_feature (788)..(788): n is a, c, g, or t
  misc_feature (791)..(791): n is a, c, g, or t
  misc_feature (809)..(809): n is a, c, g, or t
  misc_feature (811)..(811): n is a, c, g, or t
  misc_feature (817)..(817): n is a, c, g, or t
  misc_feature (826)..(826): n is a, c, g, or t
  misc_feature (840)..(840): n is a, c, g, or t
  nbla-00547-r1
gggntgnnnnngtggcttttttttgnntnaatgtcnaccttcngtcccatttttttcantgtgcaatctgaattttcaaatgttggactatgatcttcatcctttattttggcatttgatttttcaccaaattcnaagtggaaatctttctgatgtttgctttttccttaagcttacaagattttacacttgaactttctggcaagaattcagattctgtattatcataccgaacaagatcaggctgtaatgacatttcagaacttcctggtgataaacatgttttaagtatgttcttgttttagtggtgttgactgtttttcacttaatccacaagaatgtttgggagatttaccagtgggaatatgaaataaatgtaatgaagtatcatcttttgggctaaaagattcctaaagtcccctcctctctggcctttctgaacaatctagccagtatttactgtcaagtttgtaatcctggantttcctttccttccttttctgcttaactcctgggtctcttaatttaatctgatttcaatttcctttaactttgccttccgtttgtgtcacctgaaacacatatcctttttgggttgcaaacaaaattgangttcaaggatgacggacatgaagtanaaanctttatccgaaanagcttctcacaaaacttcagtacttganataagacccaaatggntttggttttacctttaaaggattaagntaaaanggttcncccgnttgcaaaaaangagtttttccngctcaaggncaattccnttccgnggnccttcccaaaaaaagccnancacaancaacctaanaaattctcaacaan

SEQ ID NO: 48 - DNA, 871 bp, Homo sapiens
  misc_feature (3)..(3): n is a, c, g, or t
  misc_feature (6)..(9): n is a, c, g, or t
  misc_feature (22)..(22): n is a, c, g, or t
  misc_feature (46)..(46): n is a, c, g, or t
  misc_feature (655)..(655): n is a, c, g, or t
  misc_feature (680)..(680): n is a, c, g, or t
  misc_feature (698)..(698): n is a, c, g, or t
  misc_feature (739)..(739): n is a, c, g, or t
  misc_feature (768)..(768): n is a, c, g, or t
  misc_feature (794)..(795): n is a, c, g, or t
  misc_feature (808)..(808): n is a, c, g, or t
  misc_feature (817)..(817): n is a, c, g, or t
  misc_feature (824)..(824): n is a, c, g, or t
  misc_feature (850)..(850): n is a, c, g, or t
  misc_feature (854)..(854): n is a, c, g, or t
  misc_feature (864)..(865): n is a, c, g, or t
  nbla-00567-f
ggnttnnnnggcccggtcccgntcacgtggccctactggtatgaangaacctccttcagtccaactatccagacgttcattctctctgccatttggcacggggtatacccaggatattatctaacgtttctaacaggggtgttaatgacattagcagcaagagctatgagaaataactttagacattatttcattgaaccttcccaactgaaattattttatgatgttataacatggatagtaactcaagtagcaataagttacacagttgtgccatttgtgcttctttctataaaaccatcactcacgttttacagctcctggtattattgcctgcacattcttggtatcttagtattattgtgttgccagtgaaaaaaactcaaagaagaaagaatacacatgaaaacattcagctctcacaatccaaaaagtttgatgaaggagaaaattctttgggacagaacagtttttctacaacaaacaatgtttgcaatcagaatcaagaaatagcctcgagacattcatcactaaagcagtgatcgggaaggctctgagggctgttttttttttttgatgttaacagaaacctatcttagcaccttttcaaggggtttgagtttgttggaaaagcagttaactggggggaaatggncagttatagataaggaattcctgtncaccagattgggaatggngtgaaacaagcctcccatggcatgtcccgtgggccacgccntatgtagaatattccataattcaatgggnactcccaaactcaacacttgtccgtnngggcacaccgtgncctgttgcngaaggtnggttgcgtatcccaagggactggaanaggnggaaaataanntgtcca

SEQ ID NO: 49 - DNA, 901 bp, Homo sapiens
  misc_feature (2)..(2): n is a, c, g, or t
  misc_feature (4)..(4): n is a, c, g, or t
  misc_feature (7)..(10): n is a, c, g, or t
  misc_feature (27)..(27): n is a, c, g, or t
  misc_feature (41)..(41): n is a, c, g, or t
  misc_feature (48)..(48): n is a, c, g, or t
  misc_feature (51)..(51): n is a, c, g, or t
  misc_feature (567)..(567): n is a, c, g, or t
  misc_feature (618)..(618): n is a, c, g, or t
  misc_feature (643)..(643): n is a, c, g, or t
  misc_feature (666)..(666): n is a, c, g, or t
  misc_feature (679)..(679): n is a, c, g, or t
  misc_feature (683)..(683): n is a, c, g, or t
  misc_feature (706)..(706): n is a, c, g, or t
  misc_feature (708)..(708): n is a, c, g, or t
  misc_feature (722)..(722): n is a, c, g, or t
  misc_feature (745)..(745): n is a, c, g, or t
  misc_feature (750)..(750): n is a, c, g, or t
  misc_feature (753)..(753): n is a, c, g, or t
  misc_feature (755)..(755): n is a, c, g, or t
  misc_feature (766)..(766): n is a, c, g, or t
  misc_feature (768)..(768): n is a, c, g, or t
  misc_feature (775)..(775): n is a, c, g, or t
  misc_feature (791)..(791): n is a, c, g, or t
  misc_feature (810)..(811): n is a, c, g, or t
  misc_feature (817)..(818): n is a, c, g, or t
  misc_feature (835)..(835): n is a, c, g, or t
  misc_feature (839)..(839): n is a, c, g, or t
  misc_feature (844)..(844): n is a, c, g, or t
  misc_feature (854)..(854): n is a, c, g, or t
  misc_feature (864)..(866): n is a, c, g, or t
  misc_feature (880)..(880): n is a, c, g, or t
  misc_feature (884)..(884): n is a, c, g, or t
  misc_feature (888)..(888): n is a, c, g, or t
  misc_feature (897)..(897): n is a, c, g, or t
  nbla-00567-r1
gngntgnnnntgtggggcttttttttngcctttgtgagacngaatctngcnctgtcacccgggctgggagtgcagtgggcacaattttagctcactgcaacctccacctcccaggttcaagcaattctcctgcctcagcctcccaagtagctgggattacaggtgtgcgccaccatgcccgtctaatttttgtgttttcagtagagacggggattcaccacgttggccaggctggtctccaactcctgacctcaagtgatccgcccacctcggcctcccaaagtgctaggattacaggtgtgagccaccatgctcagccaacataatttcaatgcatgggaaaacagaggaaatttatttagttatcaatcctttcctgggtagggttagccttatcagccggaaaacacttacttttagataaataaaaatagattaggatatttccaaacttcaaaaaagacacatgcccatttttgctgagacctcaaaagctgcaagtgcatttgcttttcccttcctccttaaatgaagtattatatagcataagccaaatgggtgccttgnccttaactcaatttgcaaatttataatggctccaaccccccgaaaaaaagngagagagaacccatcacaagaaaanttgcattcaattaaaattaaggnaaaaagttaaaantagnttcaaacaataggtcaaacaaangnggaatcaaaaaggnttgcccctcccctcccaaaaggnaaggnggnanaaacctggggntnaaggcantccaaaggcctgggancaaaatccaatcctttggnntttaanncccgggggcaacaaaantccnccggngggatttcangggaatgctnnnaatccaagggaaanttantttngggaaaaanggcc

SEQ ID NO: 50 - DNA, 881 bp, Homo sapiens
  misc_feature (2)..(2): n is a, c, g, or t
  misc_feature (4)..(11): n is a, c, g, or t
  misc_feature (26)..(26): n is a, c, g, or t
  misc_feature (503)..(503): n is a, c, g, or t
  misc_feature (625)..(625): n is a, c, g, or t
  misc_feature (641)..(641): n is a, c, g, or t
  misc_feature (678)..(678): n is a, c, g, or t
  misc_feature (683)..(683): n is a, c, g, or t
  misc_feature (703)..(703): n is a, c, g, or t
  misc_feature (715)..(715): n is a, c, g, or t
  misc_feature (733)..(733): n is a, c, g, or t
  misc_feature (751)..(751): n is a, c, g, or t
  misc_feature (762)..(762): n is a, c, g, or t
  misc_feature (769)..(769): n is a, c, g, or t
  misc_feature (796)..(797): n is a, c, g, or t
  misc_feature (806)..(806): n is a, c, g, or t
  misc_feature (819)..(819): n is a, c, g, or t
  misc_feature (829)..(829): n is a, c, g, or t
  misc_feature (833)..(833): n is a, c, g, or t
  misc_feature (836)..(836): n is a, c, g, or t
  misc_feature (855)..(855): n is a, c, g, or t
  misc_feature (857)..(857): n is a, c, g, or t
  misc_feature (862)..(862): n is a, c, g, or t
  misc_feature (864)..(864): n is a, c, g, or t
  misc_feature (867)..(867): n is a, c, g, or t
  misc_feature (875)..(877): n is a, c, g, or t
  misc_feature (880)..(881): n is a, c, g, or t
  nbla-00569-f
gngnnnnnnnnggccgggatcctcgntcacgtggccctactgggcaaccctcccaaaactgtggggcattgatgacctgactggggagcctctcattcagcgtgaggatgataaaccagagacggttatcaagagactaaaggcttatgaagaccaaacaaagccagtcctggaatattaccagaaaaaaggggtgctggaaacattctccggaacagaaaccaacaagatttggccctatgtatatgctttcctacaaactaaagttccacaaagaagccagaaagcttcagttactccatgaggagaaatgtgtgtaactattaatagtaagatgggcaaacctcctagtccttgcatttagaagctgcttttcctaagacttctagtatgtatgaattctttgaaaattatattacttttatttctactgattttattttggatactaaggatgtgccaaatgattcggatactaagatgcatcgtttgaaatcatctantgtgttgtatgcagttatcctcaaaaacatcagcgatgtctgaacctttaaaacatctgttagagcaaaattaaaaagagcatttggtagtaatccaactttttggtcaattaataagtggntgataaaagtttccanaattttccgggaaagttaaaaaaaagttacatgtcanttggngaaaatacgttatccagaanttgtgcataaantgatgccaaaaaaggcanttcaacattgtggacaangggagacactntttaaantcccgaaagaaagcaatgggttttcanntttatgggngaaacaaattaangggggccttnaacnaanaaatgttatgttaaccaanangccgngnttnatttggcnnnaann

SEQ ID NO: 51 - DNA, 884 bp, Homo sapiens
  misc_feature (3)..(4): n is a, c, g, or t
  misc_feature (6)..(8): n is a, c, g, or t
  misc_feature (11)..(12): n is a, c, g, or t
  misc_feature (26)..(26): n is a, c, g, or t
  misc_feature (45)..(45): n is a, c, g, or t
  misc_feature (466)..(466): n is a, c, g, or t
  misc_feature (490)..(490): n is a, c, g, or t
  misc_feature (561)..(561): n is a, c, g, or t
  misc_feature (598)..(598): n is a, c, g, or t
  misc_feature (608)..(608): n is a, c, g, or t
  misc_feature (611)..(611): n is a, c, g, or t
  misc_feature (626)..(626): n is a, c, g, or t
  misc_feature (635)..(635): n is a, c, g, or t
  misc_feature (637)..(637): n is a, c, g, or t
  misc_feature (640)..(640): n is a, c, g, or t
  misc_feature (651)..(651): n is a, c, g, or t
  misc_feature (684)..(684): n is a, c, g, or t
  misc_feature (688)..(689): n is a, c, g, or t
  misc_feature (700)..(700): n is a, c, g, or t
  misc_feature (716)..(716): n is a, c, g, or t
  misc_feature (727)..(727): n is a, c, g, or t
  misc_feature (729)..(729): n is a, c, g, or t
  misc_feature (747)..(747): n is a, c, g, or t
  misc_feature (765)..(765): n is a, c, g, or t
  misc_feature (774)..(775): n is a, c, g, or t
  misc_feature (781)..(781): n is a, c, g, or t
  misc_feature (787)..(787): n is a, c, g, or t
  misc_feature (815)..(815): n is a, c, g, or t
  misc_feature (824)..(824): n is a, c, g, or t
  misc_feature (827)..(827): n is a, c, g, or t
  misc_feature (839)..(839): n is a, c, g, or t
  misc_feature (847)..(847): n is a, c, g, or t
  misc_feature (864)..(864): n is a, c, g, or t
  misc_feature (866)..(866): n is a, c, g, or t
  misc_feature (870)..(870): n is a, c, g, or t
  misc_feature (874)..(874): n is a, c, g, or t
  misc_feature (878)..(878): n is a, c, g, or t
  nbla-00569-r1
ggnngnnntgnngggctttttttggnttgtttaagatcatttagnagaacagtcattcagaagccattgagacatcaggcagcagaaaggaaggtgggatggagcaggccctgtgaaggaccaagaacaaagtaatagccacagttatgaaatttcattttattctgataaagactaatatatgcttgataacctagtgataatccataagtttggtatttcacaacattttttagaaagcacataagattaacattcaaataaggcattatagaaagttttataaagaatgaagtgtttcctataattcttttaaaaaaccttggttcatcttgaaagatcgatgaattttttaaatatcagaagaaaagggaaataaaattttccccccaaaacacataagaaccacttactggcacttgtattttaagtacctgggaaaaaaacgggacagatttttaaaggnaataacgacttgtaagacggctgnttcattgatttggcacgaagtaaagtaagagtaaatatgccatgggagacataatcaagtttttcctccanctcccaaaattccccacttccaacaagacacacagtncatcaacaancancccttaaattccaanttttaaatngntgntcaaacgacancaataaaagtccttcccccttaaataagggggnaatnnatgctacaagnatcaaattccttggtnaaggacaaagnantccctcaaggaaatcaanttcccgggccctggtaanccaacaagnnaatccntttatnggacaaccggttaacaaattaaaaatgntggcaattnttnccaggggacaanttccaagnaagcccaaccattttcnanaacnaagntggntttctt

SEQ ID NO: 52 - DNA, 793 bp, Homo sapiens
  misc_feature (307)..(307): n is a, c, g, or t
  misc_feature (331)..(331): n is a, c, g, or t
  misc_feature (416)..(416): n is a, c, g, or t
  misc_feature (419)..(419): n is a, c, g, or t
  misc_feature (456)..(456): n is a, c, g, or t
  misc_feature (489)..(489): n is a, c, g, or t
  misc_feature (506)..(506): n is a, c, g, or t
  misc_feature (514)..(514): n is a, c, g, or t
  misc_feature (531)..(531): n is a, c, g, or t
  misc_feature (538)..(538): n is a, c, g, or t
  misc_feature (547)..(547): n is a, c, g, or t
  misc_feature (555)..(558): n is a, c, g, or t
  misc_feature (560)..(560): n is a, c, g, or t
  misc_feature (562)..(562): n is a, c, g, or t
  misc_feature (564)..(564): n is a, c, g, or t
  misc_feature (566)..(566): n is a, c, g, or t
  misc_feature (572)..(572): n is a, c, g, or t
  misc_feature (588)..(588): n is a, c, g, or t
  misc_feature (607)..(607): n is a, c, g, or t
  misc_feature (610)..(610): n is a, c, g, or t
  misc_feature (613)..(613): n is a, c, g, or t
  misc_feature (615)..(615): n is a, c, g, or t
  misc_feature (631)..(632): n is a, c, g, or t
  misc_feature (638)..(638): n is a, c, g, or t
  misc_feature (640)..(641): n is a, c, g, or t
  misc_feature (643)..(643): n is a, c, g, or t
  misc_feature (646)..(646): n is a, c, g, or t
  misc_feature (651)..(651): n is a, c, g, or t
  misc_feature (666)..(666): n is a, c, g, or t
  misc_feature (674)..(674): n is a, c, g, or t
  misc_feature (677)..(678): n is a, c, g, or t
  misc_feature (680)..(680): n is a, c, g, or t
  misc_feature (682)..(682): n is a, c, g, or t
  misc_feature (684)..(684): n is a, c, g, or t
  misc_feature (687)..(687): n is a, c, g, or t
  misc_feature (694)..(694): n is a, c, g, or t
  misc_feature (698)..(698): n is a, c, g, or t
  misc_feature (701)..(701): n is a, c, g, or t
  misc_feature (703)..(703): n is a, c, g, or t
  misc_feature (712)..(716): n is a, c, g, or t
  misc_feature (718)..(718): n is a, c, g, or t
  misc_feature (727)..(727): n is a, c, g, or t
  misc_feature (736)..(736): n is a, c, g, or t
  misc_feature (746)..(746): n is a, c, g, or t
  misc_feature (748)..(749): n is a, c, g, or t
  misc_feature (756)..(757): n is a, c, g, or t
  misc_feature (759)..(759): n is a, c, g, or t
  misc_feature (763)..(763): n is a, c, g, or t
  misc_feature (765)..(767): n is a, c, g, or t
  misc_feature (771)..(771): n is a, c, g, or t
  misc_feature (777)..(777): n is a, c, g, or t
  misc_feature (783)..(783): n is a, c, g, or t
  misc_feature (785)..(787): n is a, c, g, or t
  misc_feature (792)..(793): n is a, c, g, or t
  nbla-00639-f
gtttaatgcctagttatgcaacttgagtgcttttttttttttttgcaggataattttaagtgtatatattttaactgcactggtacattgaacatgtcagtgtcgatgccactggaccaacagagcattttgtggctatagggtgcctgataataatgtcttgatttttctttgggattcaactatatcgaaggtttttcccccagcagtatgggggcgtacaggtgatcgatcattaatgtcattgcaattgttattttttaaaataaatttataaaaataaccgaaaagtaatgtgacttttgangaatctgcaactcctgggttctantttgtgtttccagtgttgaaattttgatctcccccgacaagacttgtctgcatggacggtgtctctgtaaacagtatcaaacttngtnatgtctgagcctcttagctttatctcccttaatttcntcccttttggcccttccaccctgttgaggaganttttctgtcacctgcanggctgatnatacatttgatgctacnactgaangtgttatcngaatgtgnnnnantnantncatgangaaaattaacccgtantcacaaaaacaggcttaantantgnanaaattcaggtagtganngattananntnctnttggntagaatttgttttgngagaaagncanncnanangtnctttctnaatnggnanaatcccaannnnncncaaccttgnaacgggttncttaagggcncnnggaatcnnancacnannnccanaagccnccatantnnntagtnn

SEQ ID NO: 53 - DNA, 882 bp, Homo sapiens
  misc_feature (2)..(3): n is a, c, g, or t
  misc_feature (6)..(10): n is a, c, g, or t
  misc_feature (16)..(20): n is a, c, g, or t
  misc_feature (30)..(30): n is a, c, g, or t
  misc_feature (72)..(72): n is a, c, g, or t
  misc_feature (673)..(673): n is a, c, g, or t
  misc_feature (682)..(682): n is a, c, g, or t
  misc_feature (689)..(689): n is a, c, g, or t
  misc_feature (704)..(704): n is a, c, g, or t
  misc_feature (732)..(732): n is a, c, g, or t
  misc_feature (736)..(736): n is a, c, g, or t
  misc_feature (740)..(740): n is a, c, g, or t
  misc_feature (756)..(756): n is a, c, g, or t
  misc_feature (764)..(764): n is a, c, g, or t
  misc_feature (774)..(774): n is a, c, g, or t
  misc_feature (779)..(779): n is a, c, g, or t
  misc_feature (781)..(781): n is a, c, g, or t
  misc_feature (783)..(783): n is a, c, g, or t
  misc_feature (794)..(794): n is a, c, g, or t
  misc_feature (807)..(807): n is a, c, g, or t
  misc_feature (810)..(810): n is a, c, g, or t
  misc_feature (812)..(812): n is a, c, g, or t
  misc_feature (838)..(838): n is a, c, g, or t
  misc_feature (852)..(852): n is a, c, g, or t
  misc_feature (868)..(869): n is a, c, g, or t
  nbla-00666f
gnnttnnnnnggcccnnnnnggattcctcnttcactgtggcccctactgggacaccgccaaaggaagtcaanaaggaagttaagaaggaagagaagaaggaagtgaaaaaggaagaaaaggaacccaaaaaagaaattaagaagctccctaaagacgcaaagaaatcatctactcctctgtctgaagcaaaaaaaccagctgctttaaaaccaaaagtacccaagaaggaagagtctgtcaagaaagattctgttgctgccggaaagccaaaggagaaggggaaaataaaagtcattaagaaggaaggcaaggccgcagaggctgtcgctgcagctgccggcactggagccaccacagcagctgtcatggcggcagctggaatagcagccattggccctgccaaagaactcgaagctgagaggtcccttatgtcatctcctgaggatctaaccaaggactttgaagagttaaaggctgaagaggtcgatgtaacaaaggacatcaagcctcagctggagctaatcgaagacgaagagaaactgaaggaaactgagccagtcgaagcctacgtcatccagaaggagagagaagtcaccaaaggtcctgccgagtcccctgatgagggaatcactaccactgaaggggaaggcgaatgtgaacaagacacctgangaactggancccgtcnagaaacaaggaatanacgacattgaaaaattttgaagatgaangganccgntttgaagaatcctcanagactggngactatgaanagaangnanaaactgaggangctgaggagccanaanangatggggaaggaacactttgttttancgcctccaaagcanaagcccactgagggtnnaggaaatttccaa

SEQ ID NO: 54 - DNA, 961 bp, Homo sapiens
  misc_feature (2)..(5): n is a, c, g, or t
  misc_feature (7)..(8): n is a, c, g, or t
  misc_feature (10)..(14): n is a, c, g, or t
  misc_feature (16)..(17): n is a, c, g, or t
  misc_feature (19)..(19): n is a, c, g, or t
  misc_feature (22)..(23): n is a, c, g, or t
  misc_feature (25)..(25): n is a, c, g, or t
  misc_feature (27)..(41): n is a, c, g, or t
  misc_feature (43)..(47): n is a, c, g, or t
  misc_feature (49)..(50): n is a, c, g, or t
  misc_feature (53)..(54): n is a, c, g, or t
  misc_feature (56)..(57): n is a, c, g, or t
  misc_feature (60)..(60): n is a, c, g, or t
  misc_feature (63)..(63): n is a, c, g, or t
  misc_feature (66)..(66): n is a, c, g, or t
  misc_feature (68)..(69): n is a, c, g, or t
  misc_feature (71)..(72): n is a, c, g, or t
  misc_feature (74)..(76): n is a, c, g, or t
  misc_feature (78)..(78): n is a, c, g, or t
  misc_feature (85)..(85): n is a, c, g, or t
  misc_feature (87)..(87): n is a, c, g, or t
  misc_feature (93)..(93): n is a, c, g, or t
  misc_feature (95)..(97): n is a, c, g, or t
  misc_feature (99)..(100): n is a, c, g, or t
  misc_feature (125)..(125): n is a, c, g, or t
  misc_feature (127)..(127): n is a, c, g, or t
  misc_feature (136)..(136): n is a, c, g, or t
  misc_feature (138)..(139): n is a, c, g, or t
  misc_feature (154)..(154): n is a, c, g, or t
  misc_feature (161)..(161): n is a, c, g, or t
  misc_feature (163)..(163): n is a, c, g, or t
  misc_feature (166)..(166): n is a, c, g, or t
  misc_feature (195)..(195): n is a, c, g, or t
  misc_feature (198)..(198): n is a, c, g, or t
  misc_feature (201)..(202): n is a, c, g, or t
  misc_feature (204)..(204): n is a, c, g, or t
  misc_feature (219)..(219): n is a, c, g, or t
  misc_feature (221)..(221): n is a, c, g, or t
  misc_feature (228)..(228): n is a, c, g, or t
  misc_feature (234)..(234): n is a, c, g, or t
  misc_feature (246)..(246): n is a, c, g, or t
  misc_feature (249)..(249): n is a, c, g, or t
  misc_feature (251)..(251): n is a, c, g, or t
  misc_feature (258)..(258): n is a, c, g, or t
  misc_feature (275)..(275): n is a, c, g, or t
  misc_feature (277)..(277): n is a, c, g, or t
  misc_feature (295)..(295): n is a, c, g, or t
  misc_feature (306)..(306): n is a, c, g, or t
  misc_feature (311)..(311): n is a, c, g, or t
  misc_feature (322)..(323): n is a, c, g, or t
  misc_feature (329)..(329): n is a, c, g, or t
  misc_feature (340)..(340): n is a, c, g, or t
  misc_feature (350)..(350): n is a, c, g, or t
  misc_feature (362)..(362): n is a, c, g, or t
  misc_feature (365)..(365): n is a, c, g, or t
  misc_feature (372)..(372): n is a, c, g, or t
  misc_feature (376)..(376): n is a, c, g, or t
  misc_feature (388)..(388): n is a, c, g, or t
  misc_feature (395)..(395): n is a, c, g, or t
  misc_feature (412)..(412): n is a, c, g, or t
  misc_feature (417)..(417): n is a, c, g, or t
  misc_feature (423)..(423): n is a, c, g, or t
  misc_feature (430)..(430): n is a, c, g, or t
  misc_feature (433)..(433): n is a, c, g, or t
  misc_feature (437)..(437): n is a, c, g, or t
  misc_feature (458)..(458): n is a, c, g, or t
  misc_feature (460)..(460): n is a, c, g, or t
  misc_feature (464)..(464): n is a, c, g, or t
  misc_feature (482)..(482): n is a, c, g, or t
  misc_feature (501)..(501): n is a, c, g, or t
  misc_feature (504)..(504): n is a, c, g, or t
  misc_feature (518)..(518): n is a, c, g, or t
  misc_feature (524)..(524): n is a, c, g, or t
  misc_feature (528)..(528): n is a, c, g, or t
  misc_feature (536)..(536): n is a, c, g, or t
  misc_feature (539)..(539): n is a, c, g, or t
  misc_feature (568)..(568): n is a, c, g, or t
  misc_feature (571)..(571): n is a, c, g, or t
  misc_feature (573)..(573): n is a, c, g, or t
  misc_feature (575)..(575): n is a, c, g, or t
  misc_feature (602)..(602): n is a, c, g, or t
  misc_feature (614)..(614): n is a, c, g, or t
  misc_feature (628)..(628): n is a, c, g, or t
  misc_feature (630)..(630): n is a, c, g, or t
  misc_feature (635)..(635): n is a, c, g, or t
  misc_feature (638)..(638): n is a, c, g, or t
  misc_feature (647)..(647): n is a, c, g, or t
  misc_feature (649)..(649): n is a, c, g, or t
  misc_feature (666)..(666): n is a, c, g, or t
  misc_feature (669)..(669): n is a, c, g, or t
  misc_feature (681)..(681): n is a, c, g, or t
  misc_feature (684)..(684): n is a, c, g, or t
  misc_feature (686)..(686): n is a, c, g, or t
  misc_feature (700)..(700): n is a, c, g, or t
  misc_feature (705)..(705): n is a, c, g, or t
  misc_feature (726)..(726): n is a, c, g, or t
  misc_feature (741)..(741): n is a, c, g, or t
  misc_feature (743)..(743): n is a, c, g, or t
  misc_feature (753)..(753): n is a, c, g, or t
  misc_feature (760)..(760): n is a, c, g, or t
  misc_feature (812)..(813): n is a, c, g, or t
  misc_feature (847)..(847): n is a, c, g, or t
  misc_feature (856)..(856): n is a, c, g, or t
  misc_feature (862)..(862): n is a, c, g, or t
  misc_feature (868)..(868): n is a, c, g, or t
  misc_feature (870)..(870): n is a, c, g, or t
  misc_feature (887)..(887): n is a, c, g, or t
  misc_feature (895)..(895): n is a, c, g, or t
  misc_feature (902)..(902): n is a, c, g, or t
  misc_feature (911)..(911): n is a, c, g, or t
  misc_feature (916)..(916): n is a, c, g, or t
  misc_feature (919)..(919): n is a, c, g, or t
  misc_feature (921)..(922): n is a, c, g, or t
  misc_feature (924)..(924): n is a, c, g, or t
  misc_feature (927)..(927): n is a, c, g, or t
  misc_feature (936)..(936): n is a, c, g, or t
  misc_feature (944)..(944): n is a, c, g, or t
  misc_feature (954)..(955): n is a, c, g, or t
  misc_feature (957)..(957): n is a, c, g, or t
  nbla-00666r1
cnnnnannannnnnanngnaannanannnnnnnnnnnnnnngnnnnnannggnngnnctnagnagnannanncnnngntgattantnaggccnannngnnttattttttggcctttttttttttnanttttttttntnntttttttttaaaaantcaaatncnggntttttttttatttaagaggaatgtaaatngtnaanncncggttaccaagggananataaaancaaaancaaaaaacgggnctnanttggccnggaaacccttgttttcnanccttttcttcaaaaggantttcggaaccncggcnaaaacccttgnnaccaanacttaaaaaantttcaaaagnaaacccggttcnaangaggggngggntgcgtaaagggnaaaaaantttttcaaaaggaaacnctgantcaggnacgggcncanccanggggcttatggaacccctttnantccnacctttggaaacacgganttcaaaacccacgggaacngcngggggtttttcaanaacttntgtnggaaaaanacnggatttcccgccagtaggaaattgataanaangngngtgaccaacaactgccattcacgggcngaaaatgggganacaacttccaaaancncttgnccncaggactancnaaaagttcttcaaaaanttnttgggggccccncangnaaaaaccggggggnaattntggcccccgaaaaaaaatttnaacccaatggggggncnaaaaaaaaanttcaaanctaaggtttcaccccaagggggggctttttccaaagggggaatgggggaaannggccccagggaaggggctccttccaaaggggcgnaactttttnactttnaaaaancngaaaagccaaccttgangtcccaanagggggngggggtttnccttnaanannantanccccccctnagcaattnggcgaatttnncncccc

SEQ ID NO: 55 - DNA, 801 bp, Homo sapiens
  misc_feature (2)..(4): n is a, c, g, or t
  misc_feature (8)..(8): n is a, c, g, or t
  misc_feature (15)..(18): n is a, c, g, or t
  misc_feature (39)..(39): n is a, c, g, or t
  misc_feature (41)..(41): n is a, c, g, or t
  misc_feature (53)..(53): n is a, c, g, or t
  misc_feature (65)..(65): n is a, c, g, or t
  misc_feature (364)..(364): n is a, c, g, or t
  misc_feature (409)..(409): n is a, c, g, or t
  misc_feature (476)..(476): n is a, c, g, or t
  misc_feature (508)..(508): n is a, c, g, or t
  misc_feature (570)..(570): n is a, c, g, or t
  misc_feature (593)..(593): n is a, c, g, or t
  misc_feature (612)..(612): n is a, c, g, or t
  misc_feature (614)..(614): n is a, c, g, or t
  misc_feature (632)..(632): n is a, c, g, or t
  misc_feature (647)..(647): n is a, c, g, or t
  misc_feature (652)..(652): n is a, c, g, or t
  misc_feature (663)..(663): n is a, c, g, or t
  misc_feature (685)..(685): n is a, c, g, or t
  misc_feature (693)..(693): n is a, c, g, or t
  misc_feature (695)..(695): n is a, c, g, or t
  misc_feature (699)..(699): n is a, c, g, or t
  misc_feature (721)..(721): n is a, c, g, or t
  misc_feature (733)..(733): n is a, c, g, or t
  misc_feature (745)..(745): n is a, c, g, or t
  misc_feature (754)..(754): n is a, c, g, or t
  misc_feature (774)..(774): n is a, c, g, or t
  misc_feature (791)..(791): n is a, c, g, or t
  misc_feature (793)..(793): n is a, c, g, or t
  misc_feature (797)..(797): n is a, c, g, or t
  misc_feature (799)..(799): n is a, c, g, or t
  nbla-00724-f
gnnntgtngcttttnnnngggcatcctctagcactggcngnctactgggaaanctacaatttcanccccactggctgagatgaccagctgacctttaaggctgttgaaggatctctcatcccactctcctggcactagggatttctccacacccaccatctccgaaggaaaagcagaatccactccctcccacactctttctgccatttcattcatgcatgcctgaatcagaaccctcactctctctgccattcattcatacatgcctgaatcagaaccttcactctctctgccattcattcatacatgcctgaatcagaaccctcactctctctgtcatttcattcatacatgcctgaatcanaaccctcacactctctgtcatttcattcatacatgcctgaatcanaaccctgcccagcgacacaaacggagtgctcagttctgccgtgaagatgcagccgacaaagaagtcnccaaggtctccccggagcctctgcggatgacnaaacgaaaaggggaagtaagtggaggttaagaaaccaccagaaggaaaattccaacgaaggntactgaaaagggtaactgtgacnggcaaaggacgctcaatangnaagcgcagactactgtancgctgcttccgttgnaacangcactttgatngtccaagccctaagattcaaangcaaattnanacanggtgacggggttccacaacaanctctgaattttngtgacaacccgnaaggaaggntgaaagcctacttttgtgtnccaacttatcatgcaananactnantc

SEQ ID NO: 56 - DNA, 791 bp, Homo sapiens
  misc_feature (2)..(3): n is a, c, g, or t
  misc_feature (21)..(21): n is a, c, g, or t
  misc_feature (46)..(46): n is a, c, g, or t
  misc_feature (50)..(50): n is a, c, g, or t
  misc_feature (553)..(553): n is a, c, g, or t
  misc_feature (581)..(581): n is a, c, g, or t
  misc_feature (669)..(669): n is a, c, g, or t
  misc_feature (671)..(671): n is a, c, g, or t
  misc_feature (705)..(705): n is a, c, g, or t
  misc_feature (759)..(759): n is a, c, g, or t
  misc_feature (762)..(762): n is a, c, g, or t
  misc_feature (768)..(768): n is a, c, g, or t
  nbla-00724-r1
gnntgtggcttttttttggcnttttctgagacagtctcactctgcngccncagctgggagtgcagtgggtgtgatctcagctcactgcaacctccgcctcccgggttcaagcgattctcctgcctcagcctcctgagtagctgggattgcaggtgcccaccaccacgcccggctaatgtttgtatttttagtagagatggggttttgccatgttggccaggctgacttcaaactcctgaactcaagtgatccgcccgcctcggcctcccaaagttctgggattacaggcatgagccactgcgcccggcctgagctagatgtcttgaccgttacttaggagtcgggattgcccctcttttctttgccactcataggcacccattctccttgtgcctgctgcttcagagccacctcccccaggtgaatagtggaggaacaccattacacatgaaacgttcatgatcctccttaccaacatcaacatcaacatactttttcttttttgagacagggtttcactctgtcaccccgggtggagtgcagttgttggatnacagctcactgtacctcaaactactggnctcaagtgatcctcctgcctctgcttccaagaaagctgggaacacaggcacacactacaacgtccaactaattcctgtaattttgtanantttctccatgttgcccaagctggtctcaaactcntgggctcaagtgatctcctgcctaaggctccaaagtgctgggattacaagggcnaancaatgnaaccgggcccaaaaattcttttt

SEQ ID NO: 57 - DNA, 796 bp, Homo sapiens
  misc_feature (2)..(9): n is a, c, g, or t
  misc_feature (15)..(17): n is a, c, g, or t
  misc_feature (21)..(21): n is a, c, g, or t
  misc_feature (50)..(50): n is a, c, g, or t
  misc_feature (377)..(377): n is a, c, g, or t
  misc_feature (509)..(509): n is a, c, g, or t
  misc_feature (521)..(521): n is a, c, g, or t
  misc_feature (544)..(544): n is a, c, g, or t
  misc_feature (594)..(594): n is a, c, g, or t
  misc_feature (615)..(615): n is a, c, g, or t
  misc_feature (633)..(633): n is a, c, g, or t
  misc_feature (635)..(635): n is a, c, g, or t
  misc_feature (675)..(675): n is a, c, g, or t
  misc_feature (718)..(718): n is a, c, g, or t
  misc_feature (743)..(743): n is a, c, g, or t
  misc_feature (779)..(779): n is a, c, g, or t
  misc_feature (782)..(782): n is a, c, g, or t
  misc_feature (793)..(793): n is a, c, g, or t
  misc_feature (796)..(796): n is a, c, g, or t
  nbla-00727-f
gnnnnnnnntttttnnnggcntcttttgcactggctcgcctactggactnaggagtgggagccccggggtcagagcgataattcccccacaggaggcatccgctctacggcgggagattgaggacaagctgaagcaggaggaggagactctgtccttcatccgagacagcctggagaagagcgaccagctcactaagaacatggtgtctatcttatcatcctttgagagccgccttatgaagctggagaactccatcatccctgtgcacaagcagacggagaatctgcagcggctgcaggagaatgttgagaagacgctgtcctgcctggaccatgtcatcagctactaccatgtggccagtgacactgagaagatnatcagagagggccccacaggtaggctggaagagtacctgggaagcatggccaagattcagaaggcagtggagtatttccaggacaacagcccagacagcccggaactcaacaaagtgaaactgctctttgancgcgggaaggangccctggagtccgaatttcgcancctgatgacgcggcacagtaaggtcgtctcgcccgtgctcatcttggatntgatcagtggtgacgatgatntggagggccaagaggacntnaccctggagcacctgccgaaaacgtgctccaagatgtcantcgcatctcccgctggctggttggatatggccgcaaccaaganttcatgacgtctactaacaagatanctccaaccaactggaccgctccatcaaagggctganggncatttcattanaan

SEQ ID NO: 58 - DNA, 799 bp, Homo sapiens
  misc_feature (2)..(2): n is a, c, g, or t
  misc_feature (46)..(46): n is a, c, g, or t
  misc_feature (63)..(63): n is a, c, g, or t
  misc_feature (307)..(307): n is a, c, g, or t
  misc_feature (312)..(312): n is a, c, g, or t
  misc_feature (483)..(483): n is a, c, g, or t
  misc_feature (520)..(520): n is a, c, g, or t
  misc_feature (542)..(542): n is a, c, g, or t
  misc_feature (549)..(549): n is a, c, g, or t
  misc_feature (588)..(588): n is a, c, g, or t
  misc_feature (616)..(616): n is a, c, g, or t
  misc_feature (630)..(630): n is a, c, g, or t
  misc_feature (632)..(632): n is a, c, g, or t
  misc_feature (638)..(638): n is a, c, g, or t
  misc_feature (657)..(657): n is a, c, g, or t
  misc_feature (662)..(662): n is a, c, g, or t
  misc_feature (677)..(677): n is a, c, g, or t
  misc_feature (685)..(686): n is a, c, g, or t
  misc_feature (722)..(722): n is a, c, g, or t
  misc_feature (728)..(728): n is a, c, g, or t
  misc_feature (744)..(744): n is a, c, g, or t
  misc_feature (789)..(789): n is a, c, g, or t
  misc_feature (796)..(796): n is a, c, g, or t
  misc_feature (798)..(798): n is a, c, g, or t
  nbla-00727-r1
gntgtggcttttttttggccttttttttttttgccctttttttttncaaagctaacactgggncttatctgtccaatgaaacgccagtctggtggaaccaggcagggctagcagcaggctcaggcagaggtgtcgaaaaggcgatcgatcatgtcgcccacctgctccaccccgtacttgatgtacttctccgggttcttggtgaagggcacgctgccaaacttctgtagaaaggccccgtaggtctccttgacaatggtcttctgggcctggcgaatcctgtccctctgctctgtgtctggaatancccangccttctggattttgcacagttcttcgaggccatcattgaagcccttaaaacgctccttgataatctgccgctccttgtcccggagcttgactcccggctggaacacaggtagattcttctctgcgatgtaatcagtcacctttaaccagctgcgctggtaggtctggatntgctgctcaatgtgctcccggtaggagcgctcaacantcttctgtgtcactgccaccanctggatnagttcaaacttctccaaggacttgaggatgtaattgtanttgttgtgcaagaaaatggcgctcaaanctgggtcctcgtanancttggncttgctcaacaagttcaantgcangttgccaacactttncaaatatnngtgcttaacaaccgctttctgaactcaaaactgtanctgggnggcccaaaaactggtntctccggggggtctaaaaggaatattgtatgtgtccccaaaaaanttgggangnc

SEQ ID NO: 59 - DNA, 484 bp, Homo sapiens
  misc_feature (5)..(8): n is a, c, g, or t
  misc_feature (11)..(12): n is a, c, g, or t
  misc_feature (18)..(18): n is a, c, g, or t
  misc_feature (82)..(82): n is a, c, g, or t
  nbla-00751-f
ggggnnnnttnncttgcngcctgtttcctcgtgcactgttggtaactggtcggcctcgcttcaggaaaaaaagtacctcatnctcggccaccgaaaccacgtgagtgagatgagccaacagcaccggatccacagaatgtttcttctctgccttaaagagctattcactaataacatagaaatccgcaagctgggtgtgctttgagtgtgcagcctcacaaacatggccttttctctctccccttccacttttaaggatttattttttcccccttttctttattttgctggggagaggctaaagggaaaggtagtaggggcgggggtggtgacctttaagtcttctgaggttggtaattttccacaattggattgtcattatagacagcagtgtgttttttagaaagataagagaatcacccctatgctgctgagatgtacatttgtaatttatctgttgcatacttagtttttagtcctgtaa

SEQ ID NO: 60 - DNA, 485 bp, Homo sapiens
  misc_feature (2)..(4): n is a, c, g, or t
  misc_feature (6)..(6): n is a, c, g, or t
  misc_feature (10)..(10): n is a, c, g, or t
  misc_feature (43)..(43): n is a, c, g, or t
  misc_feature (72)..(72): n is a, c, g, or t
  nbla-00751-r1
gnnncntgtntgcctttgctttttttttttaaagccaaaagtnttaaagactttattccagatgtgtatcangcattataacagaacagcagaacttcaacctttggaatactgtaattttacatccctttgatgcacagtccagtatactattttattacagatcattctatagggactacagacatgaactagaggaaatgtgcacagtcacaatccagaatatcagctctgggagtgtacactgtttgttagaggatgaagcacatcctttgccatttcaaatactgtgccaggtggaggactaggaaggctcaaagatggtcatggttgacaagcactcttatcacaaacacatggatagcttatcacggagaacacatttcaaaggccagcaaagtgagcaagctattcacacaaagccaggagggattatgactaaactctccagtttataagcacaagtccacatctcacctcctcag

SEQ ID NO: 61 - DNA, 473 bp, Homo sapiens
  misc_feature (6)..(6): n is a, c, g, or t
  misc_feature (9)..(10): n is a, c, g, or t
  misc_feature (33)..(33): n is a, c, g, or t
  misc_feature (58)..(58): n is a, c, g, or t
  nbla-00757-f
tggccngcnngtttcctcgcccactgttggtanactggagttgcgcaagatggcgccngtgggggtggagaagaagctgctgctaggtcccaacgggcccgcggtggcggccgccggcgacctgaccagtgaggaggaggaaggccagagcctatggtcctccattctgagcgaagtgtccacccgcgccaggtccaagctgccgtccggcaagaacatcctggtcttcggtgaagatggttctggtaaaacaaccctcatgactaaactacaaggagctgagcatggcaaaaaaggaagaggcctagaatatctctacctcagtgtccatgatgaggaccgagatgatcacacgcgctgcaacgtgtggattctggatggagacttgtaccacaaaggcctgctgaaatttgcagtttctgctgaatccttgccagagaccctcgtcatttttgttgcagacatgtctagac

SEQ ID NO: 62 - DNA, 487 bp, Homo sapiens
  misc_feature (2)..(4): n is a, c, g, or t
  misc_feature (17)..(17): n is a, c, g, or t
  misc_feature (19)..(19): n is a, c, g, or t
  nbla-00757-r1
gnnngctgtttgccttngncttttttttttttaagccacaaggccgcataatgtaaccagccataatgtgcataaatagtcataaaattgtctttaacagtctaccatacaagtgtactctgcaaataaaatgaattttactttaaaaactaaaggctgtttattatttggcctttggttccaatgcttgaaaaccccaaaataacaaaactcatctcccttcctcccacctcccaaaaagaaccctgcagctccccaaagttggtagactttggcaaccactgagcacatgacactatgtatcagcttcttctgatactaggagcttccacttctcatgagtaaataaaagtggtctccaagaaaccttccttcacaagacatgtcttagcatttcatcagttttagtatattttatattgacacaaaaagtgcttatcagttcaaatgataaaaaataaagacaaattaaaattttgcattaaaa

SEQ ID NO: 63 - DNA, 2815 bp, Homo sapiens
  nbla-00761
gaattcctcgagcactgttggcctactggaacagcaccacttagatcctagctctgctgtaagaaaaacaaaacgggaaaaaatggaaacaatgttaaggaatgattctctcagttcagaccagtcagagtcagtgagacctccaccaccaaagcctcataaatcaaagaaaggcggtaaaatgcgccagatttcgttgagcagttcagaggaggaattggcttccacgcctgaatatacaagttgtgatgatgttgagattgaaagtgagagtgtaagtgaaaaaggagacatggattacaactggttggatcatacgtcttggcatagcagtgaggcatccccaatgtctttgcaccctgtaacctggcaaccatctaaagatggagatcgtttaattggtcgcattttattaaataagcgtctaaaagatggaagtgtacctcgagattcaggagcaatgcttggcttgaaggttgtaggaggaaagatgactgaatcaggtcggctttgtgcatttattactaaagtaaaaaaaggaagtttagctgatactgtaggacatcttagaccaggtgatgaagtattagaatggaatggaagactactgcaaggagccacatttgaggaagtgtacaacatcattctagaatccaaacctgaaccacaagtagaacttgtagtttcaaggcctattggagatataccgcgaatacctgatagcacacatgcacaactggagtccagttctagctcctttgaatctcaaaaaatggatcgtccttctatttctgttacctctcccatgagtcctggaatgttgagggatgtcccacagttcttatcaggacaactttcaagccaaagccttagtagaagaacaacgccttttgttcctagggttcagataaaactatggtttgacaaggttggtcaccaattaatagttacaattttgggagcaaaagatctcccttccagggaagatgggaggccaaggaatccttatgttaaaatttactttcttccagacagaagtgataaaaacaagagaagaactaaaacagtaaagaaaacattggaacccaaatggaaccaaacattcatttattctccagtccaccgaagagaatttcgggaacgaatgctagagattaccctttgggatcaagctcgtgttcgagaggaagaaagtgaattcttaggcgagattttaattgaattagaaacagcattattagatgatgagccacattggtacaaacttcagacgcatgatgtctcttcattgccacttccccacccttctccatatatgccacgaagacagctccatggagagagcccaacacggaggttgcaaaggtcaaagagaataagtgatagtgaagtctctgactatgactgtgatgatggaattggtgtagtatcagattatcgacatgatggtcgagatcttcaaagctcaacattatcagtgccagaacaagtaatgtcatcaaaccactgttcaccatcagggtctcctcatcgagtagatgttataggaaggactagatcatggtcacccagtgtccctcctccacaaagtcggaatgtggaacaggggcttcgagggacccgcactatgaccggacattataatacaattagccgaatggacagacatcgtgtcatggatgaccattattctccagatagagacagggattgtgaagcagcagatagacagccatatcacagatccagatcaacagaacaacggcctctccttgagcggaccaccacccgctccagatccactgaacgtcctgatacaaacctcatgaggtcgatgccttcattaatgactggaagatctgcccctccttcacctgccttatcgaggtctcatcctcgtactgggtctgtccagacaagcccatcaagtactccagtcgcaggacgaaggggccgacagcttccacagcttccaccaaagggaacgttggatagaaaagcaggaggtaaaaaactaaggagcactgtccaaagaagtacagaaacaggcctggccgtggaaatgaggaactggatgactcgacaggcaagccgagagtctacagatggtagcatgaacagctacagctcagaaggaaatctgattttccctggtgttcgcttggcctctgatagccagttcagtgatttcctggatggccttggccctgctcagctagtgggacgccagactctggcaacacctgcaatgggtgacattcaagtaggaatgatggacaaaaagggacagctggaggtagaaatcatccgggcccgtggccttgttgtaaaaccaggttccaagacactgccagcaccgtatgtaaaagtgtatctattagataacggagtctgcatagccaaaaagaaaacaaaagtggcaagaaaaacgctggaacccctttaccagcagctattatctttcgaagagagtccacaaggaaaagttttacagatcatcgtctggggagattatggccgcatggatcacaaatcttttatgggagtggcccagatacttttagatgaactagagctatccaatatggtgatcggatggttcaaacttttcccaccttcctccctagtagatccaaccttggctcctctgacaagaagagcttcccaatcatctctggaaagttcaactggaccttcttactctcgttcatagcagctgtaaaaaaattgttgtcacagcaaccagcgttacaaaaaaaaaaaaaaaaaaaggccacatgtgctcgagctgcaggtcgcggccgctagactagtc

SEQ ID NO: 64 - DNA, 815 bp, Homo sapiens
  misc_feature (42)..(42): n is a, c, g, or t
  misc_feature (48)..(48): n is a, c, g, or t
  misc_feature (65)..(65): n is a, c, g, or t
  misc_feature (123)..(123): n is a, c, g, or t
  misc_feature (457)..(457): n is a, c, g, or t
  misc_feature (474)..(474): n is a, c, g, or t
  misc_feature (506)..(506): n is a, c, g, or t
  misc_feature (554)..(554): n is a, c, g, or t
  misc_feature (559)..(559): n is a, c, g, or t
  misc_feature (583)..(583): n is a, c, g, or t
  misc_feature (587)..(588): n is a, c, g, or t
  misc_feature (596)..(596): n is a, c, g, or t
  misc_feature (604)..(604): n is a, c, g, or t
  misc_feature (611)..(611): n is a, c, g, or t
  misc_feature (643)..(643): n is a, c, g, or t
  misc_feature (653)..(653): n is a, c, g, or t
  misc_feature (655)..(656): n is a, c, g, or t
  misc_feature (663)..(663): n is a, c, g, or t
  misc_feature (672)..(672): n is a, c, g, or t
  misc_feature (682)..(684): n is a, c, g, or t
  misc_feature (688)..(688): n is a, c, g, or t
  misc_feature (710)..(710): n is a, c, g, or t
  misc_feature (717)..(717): n is a, c, g, or t
  misc_feature (735)..(735): n is a, c, g, or t
  misc_feature (742)..(742): n is a, c, g, or t
  misc_feature (744)..(746): n is a, c, g, or t
  misc_feature (771)..(771): n is a, c, g, or t
  misc_feature (773)..(773): n is a, c, g, or t
  misc_feature (790)..(790): n is a, c, g, or t
  misc_feature (805)..(805): n is a, c, g, or t
  misc_feature (811)..(811): n is a, c, g, or t
  nbla-00775-f
gcaattctaattctttttgcagatctctctgcctccaggggnttaccnctgagctgagaaagccnaaaacggagttctgtttatttctgcgcccctctcaagtaggtattaaaaaagattgangacatgaaagaaagaataactgaatgttactgatgccagaagcaactctcgctgggcgcaactctcgctgggcgcaactctcgctgggcctcagtttctcatgagcagaactgcagggggtaggtggtcccaagtctctagggtctccaccaagcttctcctcagtgcccaagaagtggtacagtgtgctctcaatagtccttcagcttatgacagcctcagctcatgggacttgatgacggggaagagcaagctgcatgccatgaagtcagccaagtttgcctgtggaggctgctcccatctcctttcaaaactgccccctcccctatcaagnccccacttcttccccanggccttgctctcagccaactgtctgggatggntttcctgtatagctttgagctccctcagcacaaggagcctgacatggngttangaaaaaagaaaggaaaatgattanaggnnccaaaagnccatgatnccataancccaaaggttaagtaccttaaggggggattangtgccctgtnanncagaatnagagagatnaaagttgggnnncaancaatagtaaggggctttaggtnacctggnaactccaggagctccaanggccaanannnatgttttattcacggcaactccccngnaattgggaagtttccancatacacatgggaanaaaccnaagg

SEQ ID NO: 65 - DNA, 799 bp, Homo sapiens
  misc_feature (369)..(369): n is a, c, g, or t
  misc_feature (394)..(394): n is a, c, g, or t
  misc_feature (406)..(406): n is a, c, g, or t
  misc_feature (492)..(492): n is a, c, g, or t
  misc_feature (507)..(507): n is a, c, g, or t
  misc_feature (532)..(532): n is a, c, g, or t
  misc_feature (555)..(555): n is a, c, g, or t
  misc_feature (562)..(562): n is a, c, g, or t
  misc_feature (574)..(574): n is a, c, g, or t
  misc_feature (618)..(618): n is a, c, g, or t
  misc_feature (629)..(629): n is a, c, g, or t
  misc_feature (645)..(645): n is a, c, g, or t
  misc_feature (664)..(664): n is a, c, g, or t
  misc_feature (671)..(671): n is a, c, g, or t
  misc_feature (704)..(704): n is a, c, g, or t
  misc_feature (738)..(738): n is a, c, g, or t
  misc_feature (747)..(747): n is a, c, g, or t
  misc_feature (756)..(756): n is a, c, g, or t
  misc_feature (767)..(767): n is a, c, g, or t
  misc_feature (771)..(771): n is a, c, g, or t
  misc_feature (779)..(779): n is a, c, g, or t
  misc_feature (783)..(783): n is a, c, g, or t
  misc_feature (785)..(788): n is a, c, g, or t
  misc_feature (798)..(799): n is a, c, g, or t
  nbla-00775-r1
aacctccacctcttgggtccaagtgattctcctgcctcagcctcccgagtagctaggactacaggcgtgcaccacgcccagctaatttttgtatttttttttttttagtagagacggggttttgccaggttggccagggtagtctcaaactcctgacctcaggtgatctgcctgcctcggcttcccaaagtgtttggattacaggtgtgagccactgcacccatccatggcccttttcttgtcctccccacggggctttgtctgatggatttcaagcatcagcaaaggaaatactgggtgtcactgtcatctgggaccaacctgattctggaggagccaaaagtctcatggtgattgatctcgtccgcntggggtgtatggttgtaatccttcnctctggcattanggcacacacgaattcctaacatcccactccaacgaaacacttgtgcacagattacaaacaccaatatgatttaatcaaacacaagnaaagaacaatgaccntcaaaaccgggtaaaaataataaanttaaaaccatggtaaaaatttanacaatcncgttaaaagttngaaggaatgattcccctcctccccaattgataaatcaacaccanataaaaataanttgttccaaaaaaaanccctggtccccaaaaaatnactgggngggggcccaaggattcccttacaatcccaatgncacaaactaaaattcccccccccaaattttaagngaaaatggnccccaactntaggaaaaggngggnccagccanattnannnntttaagggann

SEQ ID NO: 66 - DNA, 867 bp, Homo sapiens
  misc_feature (2)..(3): n is a, c, g, or t
  misc_feature (5)..(15): n is a, c, g, or t
  misc_feature (18)..(21): n is a, c, g, or t
  misc_feature (24)..(28): n is a, c, g, or t
  misc_feature (79)..(79): n is a, c, g, or t
  misc_feature (119)..(119): n is a, c, g, or t
  misc_feature (463)..(463): n is a, c, g, or t
  misc_feature (516)..(516): n is a, c, g, or t
  misc_feature (552)..(552): n is a, c, g, or t
  misc_feature (557)..(557): n is a, c, g, or t
  misc_feature (582)..(582): n is a, c, g, or t
  misc_feature (610)..(610): n is a, c, g, or t
  misc_feature (614)..(614): n is a, c, g, or t
  misc_feature (635)..(635): n is a, c, g, or t
  misc_feature (641)..(641): n is a, c, g, or t
  misc_feature (660)..(660): n is a, c, g, or t
  misc_feature (671)..(671): n is a, c, g, or t
  misc_feature (673)..(673): n is a, c, g, or t
  misc_feature (679)..(679): n is a, c, g, or t
  misc_feature (683)..(684): n is a, c, g, or t
  misc_feature (687)..(687): n is a, c, g, or t
  misc_feature (707)..(707): n is a, c, g, or t
  misc_feature (717)..(717): n is a, c, g, or t
  misc_feature (720)..(720): n is a, c, g, or t
  misc_feature (730)..(730): n is a, c, g, or t
  misc_feature (733)..(733): n is a, c, g, or t
  misc_feature (747)..(747): n is a, c, g, or t
  misc_feature (750)..(750): n is a, c, g, or t
  misc_feature (755)..(755): n is a, c, g, or t
  misc_feature (780)..(780): n is a, c, g, or t
  misc_feature (804)..(805): n is a, c, g, or t
  misc_feature (807)..(807): n is a, c, g, or t
  misc_feature (811)..(811): n is a, c, g, or t
  misc_feature (813)..(814): n is a, c, g, or t
  misc_feature (816)..(817): n is a, c, g, or t
  misc_feature (831)..(831): n is a, c, g, or t
  misc_feature (836)..(836): n is a, c, g, or t
  misc_feature (839)..(839): n is a, c, g, or t
  misc_feature (841)..(841): n is a, c, g, or t
  misc_feature (849)..(849): n is a, c, g, or t
  misc_feature (862)..(862): n is a, c, g, or t
  misc_feature (867)..(867): n is a, c, g, or t
  nbla-00784-f
gnngnnnnnnnnnnnggnnnnttnnnnntggccggatcctctttcactgaggcccctactggctaatattatattttcngccccagtgtttttaattaaaaatatgtgatagggaccanataagtaaagtacatttttctccactaaatttgaagtgagggaaagaggagccaaagtaagagatttttttttaaggaaacttaatctgattgtgaaaatcatacatctggagaaacatcagatcaggcaatagagtcagagggtcatgagcaatagacgatgatgcgaggcatttggggagcttcctggaggaaaattaagtttttttcctagcaaactaccatgtcctacaagaacttggttatataatggtgcgtccctgaatcactgattaaaaccagttgcttctgattttaagtcacaggttttacaagtattcagctctccctcatgtttcatttcnttttttaagataatctatcaaccttttttaaattttaaaatttttagatgtanagtttataagtaaaatatatttttagccattgttcngttanctgaactgatgtgtttggtctaaanggcctgacttcaaatacccttgggatcntgtnagggctctacacaaacttcantaagtntgggaaattgtatcctaanggattgtatananaatgcnttcnntanaagtacatccacttccggangtccccttgnaancccaattgcntantcaggggttcaaanccnttcanaaaaataattcactaactgtccaangggattttaaaacgtttaccggtnnanaacncnntnngggtccttcaaaantcccnaananacggttanaaaacctcccggnaaagn

SEQ ID NO: 67 - DNA, 879 bp, Homo sapiens
  misc_feature (4)..(5): n is a, c, g, or t
  misc_feature (8)..(9): n is a, c, g, or t
  misc_feature (22)..(22): n is a, c, g, or t
  misc_feature (37)..(37): n is a, c, g, or t
  misc_feature (39)..(39): n is a, c, g, or t
  misc_feature (45)..(45): n is a, c, g, or t
  misc_feature (53)..(53): n is a, c, g, or t
  misc_feature (420)..(420): n is a, c, g, or t
  misc_feature (536)..(536): n is a, c, g, or t
  misc_feature (598)..(598): n is a, c, g, or t
  misc_feature (610)..(610): n is a, c, g, or t
  misc_feature (632)..(632): n is a, c, g, or t
  misc_feature (637)..(637): n is a, c, g, or t
  misc_feature (653)..(653): n is a, c, g, or t
  misc_feature (659)..(659): n is a, c, g, or t
  misc_feature (666)..(666): n is a, c, g, or t
  misc_feature (700)..(700): n is a, c, g, or t
  misc_feature (724)..(725): n is a, c, g, or t
  misc_feature (732)..(732): n is a, c, g, or t
  misc_feature (750)..(750): n is a, c, g, or t
  misc_feature (770)..(770): n is a, c, g, or t
  misc_feature (777)..(777): n is a, c, g, or t
  misc_feature (780)..(780): n is a, c, g, or t
  misc_feature (785)..(787): n is a, c, g, or t
  misc_feature (813)..(813): n is a, c, g, or t
  misc_feature (821)..(821): n is a, c, g, or t
  misc_feature (857)..(857): n is a, c, g, or t
  misc_feature (865)..(865): n is a, c, g, or t
  misc_feature (879)..(879): n is a, c, g, or t
  nbla-00784-r1
gggnngtnntgtggcttttttnggccttttacttatnangctttnggccactnacgaatataaaactgacagatattttcaaacatttttgcaaaaaaagtaaaaccctcccctgtcacccctccccacaagatagagaataaggacttggacagagaaacaatacaaatctaaacatgaaactgtcgctcatcggttggtcccaagaggctccaacatattatattctaagtaaaggtccattaaattaagaagttaacaagccacttgacacttttatagtttaacttgccttctactctgattatgatgctcattcaaaatgctgagagacaagaacaggtaacattaacactgcacgtgacaagatattcaaagtgcataaatctatgaaaccacaaacattcataagaatactangcatgggattaaacagtgacttaaaaattaatccaagggaatctatgtacattttaacctttggatctggtcaacatgtttcctccttatgtagacattaatttggtaaagtctantaaccaagattaaatttatctggacacatttctcatctgacacaaattgtccacaagccaanttcacatgaggnaatttgggctgtttaatggcantctantggaaattctcaatgntacatnggaattnttcatttaacatgccaatgggactgggtcaaaanccttctagggaacaacaagaagtnntttcaanagcatccttcccaacaanaatggctccatattcacctnttaacangcnccatnnncaaggggtccgtgtgggtaaaatttnactttctnagggggttcaaccatcccaagggggggttcggtttntaaggggnaagggagggaatan

SEQ ID NO: 68 - DNA, 2120 bp, Homo sapiens
  nbla-00798
agtgttacttctgctctaaaagctgcggaattcctcgagcactgttggcctactggttaactttatattttcagaaaagtgtttttaattaaaaatatgtgatagggaccaaataagtaaagtacatttttctccactaaatttgaagtgagggaaagaggagccaaagtaagagatttttttttaaggaaacttaatctgattgtgaaaatcatacatctggagaaacatcagatcaggcaatagagtcagagggtcatgagcaatagacgatgatgcgaggcatttggggagcttcctggaggaaaattaagtttttttcctagcaaactaccatgtcctacaagaacttggttatataatggtgcgtccctgaatcactgattaaaaccagttgcttctgattttagtcacaggttttacaagtattcagctctccctcatgtttcatttctttttttaagataatctatcaaccttttttaaattttaaaatttttagatgtagagtttataagtaaaatatatttttagccattgttctgttagctgagctgatgtgtttggtcttagagggcctgacttcagatactctttgtgatcttgtaagggctctacacaaacttcattatgtatggtaaatttgtattcttatggattgtatatagaatgctttcgttagaagtacattctacttctgtatgtccctttgtaatccgcagttgcttactcaggggtttcatagtcatttcataaaaaataattcactagctgtctaatggtattttaagactgtttatctgtatcacaacgtcattaggagttctttcaacaattccataaatatactgtttactagaccttccctgtaaatgttcccaattcccatcctgtctcagacagtcaatagtcctgtgtacagtgactatttgcatgatttctcattgcactgctgcattcaggcactccagggcatgattaaacagtcattaacagtgcctctctggtacagttgatgcatgcattgatctttcttctctgctgtttttatatagcctttaattaaaaggaaaaaaataccactactctgcaatgcaaaagtcttcaaaattctttgtttcctgtattaatcacttctgttccagagtgaacaaatgttttcagctaagctatgtgagaatgtaagaataatatcctgcttgttctaaatagttcatatatttaaagtgtggtcagtatttcctccctgtaccttacaaacagaaaccaccctgggatggttgataccccttacgaagtcgatcttacccacacagactcctgtgtatgcgtgtctgtttataggtgtatatggagtcagtgttgataggaaggatgctctagaagtacttctgttgtttcctagaaggctatgagccagttccatggcatgtttaatgtataattcccatgtatcatgagaatttcactagaatgtcattaaacagcccaactacctcatgtgaaattggctgtggacaatctgtgtcagatgagaaatgtgttcagataaatttaatctggttaatagacttaacaaattaatgtctacataaagaagaaacatgatagaccagatgccaaaggctaaaatgtacatagatttccttggattaatttttaagtcactgtttaattccatgcctagtattcttatgaatgtttgtggtttcatagatttatgcactttgaatatctgtcacgtgcagtgttaatgttacctgttcttgtctctcagcattttgaatgagcatcataatcagagtagaaggcaagttaaactataaaagtgtcaagtggcttgttaacttcttaatttaatggacctttacttagaatataatatgttggagcctcttgggaccaaccgatgagcgacagtttcatgtttagatttgtattgtttctctgtccaagtccttattctctatcttgtggggaggggtgacaggggagggttttactttttttgcaaaaatgtttgaaaatatctgtcagattttatattcgttagttataataaacttatttttaaagtaaaaaaaaaaaaaaaaaaaaggccacatgtgctcgagctgcag

SEQ ID NO: 69 - DNA, 2134 bp, Homo sapiens
  nbla-00830
ggcctactggaaaggtatttaacatcctaaaacacttttgaaaaagccccaatttatatagaatctgaaaaacatgaaaatgccagaattaaatagtagttgtttgtgatcccttgaactctgatcattttaattagcaaaaagcaataatattttatattccatacttcccagaaagttaattgattcaaattcttgctatgttatgccgtcatgcagatcaaagagaacttgtacaaacaaaaagatattaactgttttttctagaaaaacctttgttagttatttagctatagcataatacacagtagaactcatttttccgaagatgattgccataaagctttaccattttacaaagctctagcattttaaaatgttttcctaggcattctctcattcagtcgttacctcaaagctttgaagggagtataattatcttcatttcacaaatcatgaagctaatgacatttcatggaagctatttttataggaattatggaattggagccctcctttgagtgtctttggatgttgtcaccaccatcaacaggcagtgttatctccaacatgtttgatgagaaaaaaacataaaggaaagggacttgggtttcatggcaagagattcagcttagatgggaatgagctggtctctgaggcagagtttcctgtctcatctttgtataaactccttcttagaaaccagcagaggctcttaatgtacgtccatcttctccttcccaccacagacacccactcctatgtgtgtttctgaaaattacagggtcatttgtggatgtgctttaatttagtatagatataatctgatatcattatctttctttccccccgctccccgccaccagcattccccctgcactcaatttgtgcttatattccttttgctgtatatatacccctggctcattgcttctggaagctgcattacttattctagagtgtgggtctcctacaatttatttatatagccccctaaatcagtggttctcaactgggggtgattttatgctccccaggtgtgatttggcagtgtctggagacatttttggttttcacaactggaggtgggcactgctggtacctaggtgtatagatgccaaggaggctgctaaatatcctaccatgcccaggacagcccccattacacagaatagccagtcccagagaaactcagccttagattagtgtttctccttcctggctgcacattaaaattatcaggggagcttttaaaatacactgatgctgggatccacccctgaccaattaaatcagaccctctgggatggggcctgggctttagagtgtgtttttaacactccccaggtgattctaatgtgcagccaggtttgagaatctttactctaaggactcaatctttgaaagttacagcattgtagaggggaaggatgatccagaattaattaaagaaggaagaagagtgaacagtactgaactggatgcaagattatgactgtgcaaatcctcctatttcagatttaggttctttactggtaaattggataaaaagttggcagttcttttactcactggagcatgatgaagataaatgagttacggttgccctagacttttacgattagtaaaaccaatggatggacagaataaataagtataagcagacgcctatagtctaatatcgcaactccagaaaatctttgaggaaatctcacacatgatgggagtgggacagggagttgttttgtttttgcttcccttgagtctcagcaaaagaacagtcatagaaaatatttccaaaaaatttagatataattttgcttggcaattagaatataccctctgtcagctttgttcagttgttggacctattaaccaatccataccagactaatttatttctaaacaaagtggcgaatggtgtccaatgccttttctgagaaagagaaaaatggcctcttcaaaagacgcaatttggtatagacttgtctggccgttttgtagtgttctggagtggggagcatatactaccctcacaggtaaacgaaaccttacctgtatgtattgtctcacccatatcctgctacaggagaaaaaaaaaaaaaaaaaaaggccacatgtgctcgagctgcag

SEQ ID NO: 70 - DNA, 2146 bp, Homo sapiens
  nbla-00831
ggcctactggttctgcaagatgtcaagattgttgaacaccccagatggaagcccttacacttggtgggttggcaaagccaacgagaagcactactgctggggaggctctgggcctggaatccagaaatgtgcctgcggcatcgaacgcaactgcacagatcccaagtactactgtaactgcgacgcggactacaagcaatggaggaaggatgctggtttcttatcatacaaagatcacctgccagtgagccaagtggtggttggagatactgaccgtcaaggctcagaagccaaattgagcgtaggtcctctgcgctgccaaggagacaggaattattggaatgccgcctctttcccaaacccatcctcctacctgcacttctctactttccaaggggaaactagcgctgacatttctttctacttcaaaacattaaccccctggggagtgtttcttgaaaatatgggaaaggaagatttcatcaagctggagctgaagtctgccacagaagtgtccttttcatttgatgtgggaaatgggccagtagagattgtagtgaggtcaccaacccctctcaacgatgaccagtggcaccgggtcactgcagagaggaatgtcaagcaggccagcctacaggtggaccggctaccgcagcagatccgcaaggccccaacagaaggccacacccgcctggagctctacagccagttatttgtgggtggtgctgggggccagcagggcttcctgggctgcatccgctccttgaggatgaatggggtgacacttgacctggaggaaagagcaaaggtcacacctgggttcatatccggatgctcgggccattgcaccagctatggaacaaactgtgaaaatggaggcaaatgcctagagagataccacggttactcctgcgattgctctaatactgcatatgatggaacattttgcaacaaagatgttggtgcattttttgaagaagggatgtggctacgatataactttcaggcaccagcaacaaatgccagagactccagcagcagagtagacaacgctcccgaccagcagaactcccacccggacctggcacaggaggagatccgcttcagcttcagcaccaccaaggcgccctgtattctcctctacatcagctccttcaccacagacttcttggcagtcctcgtcaaacccactggaagcttacagattcgatacaacctgggtggcacccgagagccatacaatattgacgtagaccacaggaacatggccaatggacagccccacagtgtcaacatcacccgccacgagaagaccatctttctcaagctcgatcattatccttctgtgagttaccatctgccaagttcatccgacaccctcttcaattctcccaagtcgctctttctgggaaaagttatagaaacagggaaaattgaccaagagattcacaaatacaacaccccaggattcactggttgcctctccagagtccagttcaaccagatcgcccctctcaaggccgccttgaggcagacaaacgcctcggctcacgtccacatccagggcgagctggtggagtccaactgcggggcctcgccgctgaccctctcccccatgtcgtccgccaccgacccctggcacctggatcacctggattcagccagtgcggattttccatataatccaggacaaggccaagctataagaaatggagtcaacagaaactcggctatcattggaggcgtcattgctgtggtgattttcaccatcctgtgcaccctggtcttcctgatccggtacatgttccgccacaagggcacctaccataccaacgaagcaaagggggcggagtcggcagagagcgcggacgccgccatcatgaacaacgaccccaacttcacagagaccattgatgaaagcaaaaaggaatggctcatttgaggggtggctacttggctatgggatagggaggagggaattactagggaggagagaaagggacaaaagcaccctgcttcatactcttgagcacatccttaaaatatcagcacaagttgggggaggcaggcgatggaatataatggaatattcttgagactgatcacaaaaaaaaaaaaaaaaaggccacatgtgctcgagctgcag

SEQ ID NO: 71 - DNA, 1878 bp, Homo sapiens
  nbla-00832
ggcctactggaaagaaaaaatgtgctgcgttctgaaaaataactccttagcttggtctgattgttttcagaccttaaaatataaacttgtttcacaagctttaatccatgtggatttttttttcttagagaaccacaaaacataaaaggagcaagtcggactgaatacctgtttccatagtgcccacagggtattcctcacattttctccatagaagatgctttttcccaaggctagaacgacttccaccatgatgaatttgctttttaggtcttaattatttcacttctttttagaaacttaggaagaagtggataatcctgaggtcacacaatctgtcctcccagaaatgaacaaaagtcatcaccttttctgcttgctacacaggcaacgattcccccatcagctgcccggaccctttggcctggcttggtgtgcaggcctgtctgtttgcttaaagtcagtgggttctggtgcagggagtgagaagtgggggaagtgaaagggaaagcatccgtgagaaagcggccacggttttccctccttgtgtgcccatggggcaccagctcatggtctttttcagtcatcccagtttgtacagacttagcttctgaactctaagaatgccaaagggaccgacgagactccccatcacagcgagctctgtccttacatgtatttgatgtgcatcagcggaggagaacactggcttggccctgctccgctgagtgtctgtgaaatacctctactttccctcccatatccagaacaaaatgatacttgacatccttccacaaaagtcagcctaaagaagttatggtatcatatgttaaactaagctttcaaaaaccttagtgaaatagcaagtgactgctttcaagcagcagtcgacatgtaaatgaaggtgttcttagaattcgcattttgccagctcagcgcacctccacaacgaatgaaatgctccgtatgatttgcacaaatgacatagacctccccaaaagttaactggctctccttcctcacacagttcatcataacccaaccccccacccccgggtcatgaaaatcacagaacttataaacacattgaaccctagatctcaggcttcctgacctaccgccagtggccccttgctggccaccctatagggtcctccttccctggcagccccccatgtgggagaaatacctgattctcccaatctgcagtgggagagctttgctgaattccatcccaaagtcaaacatgggcaagaggtgaggatttcacttttaccctcaagtccgatttgtctgtgattttaaactaactgtgtatgtattgatgtttggaagattgtttgaattttaaagcgataatagtacttaatgttatccagtattgttcattaaatggtgttatcctaaagctgcacttgggatttttacctaacgctttactgattctctcaagcacatggcaaagtttgatttgcactccgttcatttctgacacgttttgctgcctcctacctttctaagcgtcatgcaaattcgagaatggagaaggacgctgccggtccctgagcggtgtggagagggcggaaggtggactccagcgcagcttgaggggctgaggacggaggctgcagcatctgtgccgttctactgagcacgcttctctgcctcgctcctgactcagcactttgttcactggctcagcagttatgtttacacatcatttttatgttcctgctttgtaattcatgtttgagatgggtggccactgtacagatatttattacgctttccagactttctgaatagatttttttgaataaacatggttttatgaaaaaaaaaaaaaaaaaaaaaaggccacatgtgctcgagctgcag

SEQ ID NO: 72 - DNA, 2291 bp, Homo sapiens
  nbla-00908
cactgttggcctactgggaaatacattttgtgtgcatattgtttcatagcaagaattcgttgcaaaaatgctttatttttgaacaatgcttggaaatattatgtgacttttttgtttgtttgttttaggaggatggtgtatggtgggggcaataaatgaggttttttgcattccaaggaaatggcatatggattaactgtaagaaatgaaataagtaatttattgtaagacaacatcaagccatggaaacttggcagaagattcaaagcagcttaaacagcacttttaaattaactcctaagcgttacatggttgtgactatggaaactccagttaagacaggatcttatcagaggtggacagcgtgaagatttccttttccattttcaataaactttggaacaaccttctcgtatctcccctagagtttcgtgcccctctgaactgtctgttattgcaatgtagtttatcaacagaatttgtgtgttttcgatttaagctaaaagataatttaagaacatttatttccccttttcactttaaaaaattatgattattcctattattgttatgaaccttcttattttacatttgagggataaaggcaaatgatttgtgagtcttctagttactggaccgagttttctgctggatctggtgggaaggcagctcggtaaagtttccctcctgctccccccgcccgactttgactctgaatcagcatttggtcctattcagaggactcttaccacaacgtttctgttctacacttgggtggagaccagttgaccatagagcatttgcagagcctcattgtttgatttcttgtgactattctaagaatgaatgcaatcagattttaaaagtaactaaatatacttcagcacttttttgctttaaactagatcatcttagacttgtttataccttccagatttgattgttttactcccaatgactgcactatatgtatgcataagaccacttttgagcgctgtgttcccccttctgagtagtcctttgacgacgtgttgtgttttctgatgttgacttgagttccatttagtagcatctcttccttccatgtcttgatgttatgcaggaagtacagacgtactttaaatttttgttatgaaataaaaaaaagatgggttttgtaaaaataaaaaaaaatatttttagcagaacaggacttacagggtcattgtccccacaatgtgccagtcgactatttgcacttaccttgtcctatatatccgtacggaggtgtgcaattcctcgtgtcagtagccttgtgacactgaacctggatggattatagaggagccctcacggctgatcaataatgttgcaaagggagactacagggatctcacgacgaatattctgatacaatactcaacctcggtatatatatatgtgtataaatatatgtatatcccagcggcactttatactgttcactgtacaaaagcttacagttttccacaaggactttaataactagctgggaaaagacgatgtaattatttcggggctctgcggaaccatctctgtacagcgccccctttctgttgtgctattggttgcagctgccatgctcagaatgcgttttgagagctgaagcaaggtgcttgcagtcacctgaggccgtccgtgtggcccagggccccagctgcctttagggcccccattgttcataacagcatatgcatttccccaccgcgttgtgtctgcagcttctttgccaatatagtaatgcttttagtagagtactagatagtatcagttttggattcttattgttatcacctatgtacaatggaaagggattttaagcacaaacctgctgctcatctaacgttggtacataatctcaaatcaaaagttatctgtgactattatatagggatcacaaaagtgtcacatattagaatgctgacctttcatatggattattgtgagtcatcagagtttattataacttattgttcatattcatttctaagttaattcaagtaatcatttattaagacagaattttgtataaactatttattgtgctctctgtggaactgaagtttgatttatttttgtactacacggcatgggtttgttgacactttaattttgctataaatgtgtggaatcacaagttgctgtgatacttcatttttaaattgtgaactttgtacaaattttgtcatgctggatgttaacacatcttactctaaataaacaaggtgttgccaaaaaaaaaaaaaaaaaggccacatgtgctcgagctgcag

SEQ ID NO: 73 - DNA, 852 bp, Homo sapiens
  misc_feature (4)..(4): n is a, c, g, or t
  misc_feature (7)..(9): n is a, c, g, or t
  misc_feature (12)..(12): n is a, c, g, or t
  misc_feature (16)..(16): n is a, c, g, or t
  misc_feature (18)..(18): n is a, c, g, or t
  misc_feature (22)..(22): n is a, c, g, or t
  misc_feature (24)..(24): n is a, c, g, or t
  misc_feature (27)..(28): n is a, c, g, or t
  misc_feature (35)..(35): n is a, c, g, or t
  misc_feature (42)..(42): n is a, c, g, or t
  misc_feature (154)..(154): n is a, c, g, or t
  misc_feature (439)..(439): n is a, c, g, or t
  misc_feature (474)..(474): n is a, c, g, or t
  misc_feature (545)..(545): n is a, c, g, or t
  misc_feature (549)..(549): n is a, c, g, or t
  misc_feature (560)..(560): n is a, c, g, or t
  misc_feature (573)..(573): n is a, c, g, or t
  misc_feature (576)..(576): n is a, c, g, or t
  misc_feature (579)..(579): n is a, c, g, or t
  misc_feature (584)..(584): n is a, c, g, or t
  misc_feature (589)..(589): n is a, c, g, or t
  misc_feature (603)..(603): n is a, c, g, or t
  misc_feature (607)..(608): n is a, c, g, or t
  misc_feature (611)..(611): n is a, c, g, or t
  misc_feature (614)..(614): n is a, c, g, or t
  misc_feature (617)..(617): n is a, c, g, or t
  misc_feature (619)..(619): n is a, c, g, or t
  misc_feature (627)..(627): n is a, c, g, or t
  misc_feature (631)..(632): n is a, c, g, or t
  misc_feature (637)..(637): n is a, c, g, or t
  misc_feature (644)..(646): n is a, c, g, or t
  misc_feature (648)..(648): n is a, c, g, or t
  misc_feature (653)..(654): n is a, c, g, or t
  misc_feature (656)..(656): n is a, c, g, or t
  misc_feature (658)..(658): n is a, c, g, or t
  misc_feature (663)..(664): n is a, c, g, or t
  misc_feature (666)..(666): n is a, c, g, or t
  misc_feature (668)..(668): n is a, c, g, or t
  misc_feature (672)..(672): n is a, c, g, or t
  misc_feature (674)..(674): n is a, c, g, or t
  misc_feature (680)..(680): n is a, c, g, or t
  misc_feature (683)..(685): n is a, c, g, or t
  misc_feature (691)..(691): n is a, c, g, or t
  misc_feature (701)..(701): n is a, c, g, or t
  misc_feature (707)..(707): n is a, c, g, or t
  misc_feature (714)..(716): n is a, c, g, or t
  misc_feature (718)..(720): n is a, c, g, or t
  misc_feature (722)..(722): n is a, c, g, or t
  misc_feature (724)..(725): n is a, c, g, or t
  misc_feature (727)..(728): n is a, c, g, or t
  misc_feature (734)..(734): n is a, c, g, or t
  misc_feature (736)..(742): n is a, c, g, or t
  misc_feature (745)..(745): n is a, c, g, or t
  misc_feature (747)..(747): n is a, c, g, or t
  misc_feature (749)..(750): n is a, c, g, or t
  misc_feature (752)..(753): n is a, c, g, or t
  misc_feature (756)..(756): n is a, c, g, or t
  misc_feature (759)..(759): n is a, c, g, or t
  misc_feature (766)..(769): n is a, c, g, or t
  misc_feature (771)..(771): n is a, c, g, or t
  misc_feature (776)..(778): n is a, c, g, or t
  misc_feature (780)..(780): n is a, c, g, or t
  misc_feature (783)..(786): n is a, c, g, or t
  misc_feature (788)..(790): n is a, c, g, or t
  misc_feature (792)..(794): n is a, c, g, or t
  misc_feature (796)..(796): n is a, c, g, or t
  misc_feature (799)..(802): n is a, c, g, or t
  misc_feature (804)..(804): n is a, c, g, or t
  misc_feature (806)..(808): n is a, c, g, or t
  misc_feature (810)..(813): n is a, c, g, or t
  misc_feature (815)..(818): n is a, c, g, or t
  misc_feature (820)..(823): n is a, c, g, or t
  misc_feature (826)..(826): n is a, c, g, or t
  misc_feature (828)..(828): n is a, c, g, or t
  misc_feature (830)..(834): n is a, c, g, or t
  misc_feature (836)..(836): n is a, c, g, or t
  misc_feature (838)..(838): n is a, c, g, or t
  misc_feature (840)..(840): n is a, c, g, or t
  misc_feature (842)..(842): n is a, c, g, or t
  misc_feature (844)..(844): n is a, c, g, or t
  misc_feature (846)..(846): n is a, c, g, or t
  misc_feature (848)..(849): n is a, c, g, or t
  misc_feature (852)..(852): n is a, c, g, or t
  nbla-02890-f
gagnagnnnagntggngngganantgnnatttgantcctctncctgttggcctactggagatgcttctgggtcgcggtgtgctaagcgaggagtccgagtgtgtgagcttgagagccgcgcgctagagcgacccggcgagggatggcggccacngggaccgcggccgccgcagccacgggcaggctcctgcttctgctgctggtggggctcacggcgcctgccttggcgctggccggctacatcgaggctcttgcagccaatgccggaacaggatttgctgttgctgagcctcaaatcgcaatgttttgtgggaagttaaatatgcatgtgaacattcagactgggaaatgggaacctgatccaacaggcaccaagagctgctttgaaacaaaagaagaagttcttcagtactgtcaggagatgtatccagagctacanatcacaaatgtgatggaggcaaaccagcgggttantattgacaactggtgccggagggacaaaaagcaatgcaagagtcctttgttacacctttaaagtgctcgtnggtnaatttgtaagngatgtcctgctanttncanaaaantgccnagtttttcacaaanagcnnatngangtntnttagaatnacanncttgnacaccgnnntnaaaanncntnttttnntnanggantnaccttnttnnnttccgnttctgttccntttggnttaaccnnntnnntngnntnnaatatntnnnnnnnccntnannannaanttntgttttnnnnanataannntnatnnnntnnntnnntnatnnnntntnnnannnntnnnntnnnnctntntnnnnntntntntntntntnnccn

SEQ ID NO: 74 - DNA, 862 bp, Homo sapiens
  misc_feature (5)..(5): n is a, c, g, or t
  misc_feature (10)..(10): n is a, c, g, or t
  misc_feature (12)..(13): n is a, c, g, or t
  misc_feature (29)..(29): n is a, c, g, or t
  misc_feature (32)..(32): n is a, c, g, or t
  misc_feature (385)..(385): n is a, c, g, or t
  misc_feature (391)..(391): n is a, c, g, or t
  misc_feature (414)..(414): n is a, c, g, or t
  misc_feature (443)..(443): n is a, c, g, or t
  misc_feature (480)..(480): n is a, c, g, or t
  misc_feature (488)..(488): n is a, c, g, or t
  misc_feature (505)..(506): n is a, c, g, or t
  misc_feature (509)..(509): n is a, c, g, or t
  misc_feature (525)..(525): n is a, c, g, or t
  misc_feature (531)..(531): n is a, c, g, or t
  misc_feature (534)..(534): n is a, c, g, or t
  misc_feature (536)..(536): n is a, c, g, or t
  misc_feature (539)..(539): n is a, c, g, or t
  misc_feature (548)..(548): n is a, c, g, or t
  misc_feature (550)..(550): n is a, c, g, or t
  misc_feature (556)..(556): n is a, c, g, or t
  misc_feature (560)..(560): n is a, c, g, or t
  misc_feature (562)..(562): n is a, c, g, or t
  misc_feature (564)..(564): n is a, c, g, or t
  misc_feature (577)..(577): n is a, c, g, or t
  misc_feature (579)..(579): n is a, c, g, or t
  misc_feature (581)..(581): n is a, c, g, or t
  misc_feature (591)..(591): n is a, c, g, or t
  misc_feature (595)..(596): n is a, c, g, or t
  misc_feature (602)..(602): n is a, c, g, or t
  misc_feature (611)..(611): n is a, c, g, or t
  misc_feature (618)..(618): n is a, c, g, or t
  misc_feature (624)..(629): n is a, c, g, or t
  misc_feature (632)..(632): n is a, c, g, or t
  misc_feature (641)..(641): n is a, c, g, or t
  misc_feature (643)..(643): n is a, c, g, or t
  misc_feature (647)..(648): n is a, c, g, or t
  misc_feature (651)..(651): n is a, c, g, or t
  misc_feature (662)..(662): n is a, c, g, or t
  misc_feature (667)..(668): n is a, c, g, or t
  misc_feature (670)..(670): n is a, c, g, or t
  misc_feature (672)..(672): n is a, c, g, or t
  misc_feature (675)..(676): n is a, c, g, or t
  misc_feature (680)..(681): n is a, c, g, or t
  misc_feature (690)..(691): n is a, c, g, or t
  misc_feature (696)..(699): n is a, c, g, or t
  misc_feature (701)..(702): n is a, c, g, or t
  misc_feature (706)..(706): n is a, c, g, or t
  misc_feature (710)..(710): n is a, c, g, or t
  misc_feature (713)..(713): n is a, c, g, or t
  misc_feature (722)..(722): n is a, c, g, or t
  misc_feature (728)..(728): n is a, c, g, or t
  misc_feature (734)..(734): n is a, c, g, or t
  misc_feature (740)..(740): n is a, c, g, or t
  misc_feature (743)..(743): n is a, c, g, or t
  misc_feature (747)..(747): n is a, c, g, or t
  misc_feature (750)..(750): n is a, c, g, or t
  misc_feature (754)..(754): n is a, c, g, or t
  misc_feature (757)..(757): n is a, c, g, or t
  misc_feature (759)..(759): n is a, c, g, or t
  misc_feature (763)..(763): n is a, c, g, or t
  misc_feature (770)..(770): n is a, c, g, or t
  misc_feature (772)..(772): n is a, c, g, or t
  misc_feature (774)..(774): n is a, c, g, or t
  misc_feature (776)..(777): n is a, c, g, or t
  misc_feature (790)..(791): n is a, c, g, or t
  misc_feature (796)..(796): n is a, c, g, or t
  misc_feature (800)..(800): n is a, c, g, or t
  misc_feature (805)..(805): n is a, c, g, or t
  misc_feature (811)..(811): n is a, c, g, or t
  misc_feature (818)..(819): n is a, c, g, or t
  misc_feature (821)..(821): n is a, c, g, or t
  misc_feature (825)..(826): n is a, c, g, or t
  misc_feature (829)..(830): n is a, c, g, or t
  misc_feature (833)..(833): n is a, c, g, or t
  misc_feature (838)..(838): n is a, c, g, or t
  misc_feature (840)..(841): n is a, c, g, or t
  misc_feature (848)..(849): n is a, c, g, or t
  misc_feature (853)..(853): n is a, c, g, or t
  misc_feature (855)..(857): n is a, c, g, or t
  misc_feature (859)..(859): n is a, c, g, or t
  misc_feature (861)..(861): n is a, c, g, or t
  nbla-02890-r1
gaggngttgnanntttgtggccttttttnttnttctttttttggtggaagttaaagtatttattgatgtgtttaaactgtgtacattctccacagatcatattaaggagtttgtaggtgaagtttaatctgtgcatagggggtagagacatgaatagggtcaaaggggaggaaaaaggaaaaaaacaaaacaaaaacagtcacaggaaaataaaaatacaccacaggttaccagaaccttcagatttaaaataaaaagaaagaaaaagcagaagcagtgagcatcgacatcaactgtacaagcattacaaagactcctgtgacgaaaacacaattgttcaaagctttccacagtgtccacagactcagtttcagggacagcctgnactacnttcctttcacacaaacaaacctncccgtgttccctcctgggccagcggccgncttcttggtgtggtcttctttgagtgaatgtcacaanggcccgtnacatggaaggggttggnngtngatgggcaaagtttangcccanggntnaantgccttttnanaaaagnccananangatgaaccctgcncntntggaccttanttgnntggggnattgaccgnttaaaancttccnnnnnngtnatcatcttncntttnnatntcaaatttaancttcnngntnatnncttnngaatcctgnnttctnnnnannttcntttntgnctcccttantttttncctttntttttnaanactntgnattnatncntttntcgtccntngntnnttgactttttttnnacccnctgntttcntccttntaacttnntntttnnaannggnccttnanntcttttnntttntnnntnanc

SEQ ID NO: 75 - DNA, 851 bp, Homo sapiens
  misc_feature (1)..(4): n is a, c, g, or t
  misc_feature (7)..(9): n is a, c, g, or t
  misc_feature (337)..(337): n is a, c, g, or t
  misc_feature (415)..(415): n is a, c, g, or t
  misc_feature (518)..(518): n is a, c, g, or t
  misc_feature (574)..(574): n is a, c, g, or t
  misc_feature (601)..(601): n is a, c, g, or t
  misc_feature (615)..(615): n is a, c, g, or t
  misc_feature (628)..(628): n is a, c, g, or t
  misc_feature (669)..(669): n is a, c, g, or t
  misc_feature (680)..(680): n is a, c, g, or t
  misc_feature (696)..(696): n is a, c, g, or t
  misc_feature (702)..(702): n is a, c, g, or t
  misc_feature (707)..(707): n is a, c, g, or t
  misc_feature (717)..(717): n is a, c, g, or t
  misc_feature (731)..(731): n is a, c, g, or t
  misc_feature (739)..(739): n is a, c, g, or t
  misc_feature (748)..(748): n is a, c, g, or t
  misc_feature (764)..(764): n is a, c, g, or t
  misc_feature (771)..(771): n is a, c, g, or t
  misc_feature (781)..(781): n is a, c, g, or t
  misc_feature (788)..(788): n is a, c, g, or t
  misc_feature (793)..(793): n is a, c, g, or t
  misc_feature (800)..(800): n is a, c, g, or t
  misc_feature (805)..(805): n is a, c, g, or t
  misc_feature (807)..(807): n is a, c, g, or t
  misc_feature (828)..(828): n is a, c, g, or t
  misc_feature (831)..(831): n is a, c, g, or t
  misc_feature (838)..(838): n is a, c, g, or t
  misc_feature (845)..(845): n is a, c, g, or t
  nbla-02969-f
nnnnttnnntttgaattcccgttcctgttggcctactggcaaattagaaaatgaattgaggaccacaaagagtgaaatggcgcgatacctaaaagaataccaagacctcctcaacgtgaagatggctttggatattgagattgcagcttacaggaaactcttggaaggcgaggagacccgactcagtttcaccagcgtgggaagcataaccagtggctactcccagagctcccaggtctttggccgatctgcctacggcggtttacagaccagctcctatctgatgtccacccgctccttcccgtcctactacaccagccatgtccaagaggagcanatcgaagtggaggaaaccattgaggctgccaaggctgaggaagccaaggatgagcccccctctgaaggagaagccgangaggaggagaaggcaaggaagaagccgaggaagaagaagcagctgaagaggaagaagcttgccaaggaagaatctgaagaaacaaaagaagaagaagaaggangtgaaggtgaagaaggagaaggaacccaagaagcttgaagaggaggagaaagaaangttgaaggtgcttgggaaggaccagcnactttagaagaaanattggaccccccntttccttaattatttcagggataatcttcccgaattaggtnaaccccattanccaaccaaccaacccnttgagnttccnaattttttgnggaattaaaaagcnatttttgnttactttgnaatgcttaggttggcnattcaangtgggctttnaattccnctttntccaaantttgntncttcaaaaggcttttggcttnttncaacctngcatggncaccct

SEQ ID NO: 76 - DNA, 817 bp, Homo sapiens
  misc_feature (3)..(3): n is a, c, g, or t
  misc_feature (6)..(6): n is a, c, g, or t
  misc_feature (8)..(8): n is a, c, g, or t
  misc_feature (12)..(12): n is a, c, g, or t
  misc_feature (15)..(17): n is a, c, g, or t
  misc_feature (20)..(20): n is a, c, g, or t
  misc_feature (33)..(34): n is a, c, g, or t
  misc_feature (529)..(529): n is a, c, g, or t
  misc_feature (564)..(564): n is a, c, g, or t
  misc_feature (574)..(574): n is a, c, g, or t
  misc_feature (598)..(598): n is a, c, g, or t
  misc_feature (603)..(603): n is a, c, g, or t
  misc_feature (605)..(605): n is a, c, g, or t
  misc_feature (614)..(614): n is a, c, g, or t
  misc_feature (630)..(630): n is a, c, g, or t
  misc_feature (639)..(639): n is a, c, g, or t
  misc_feature (642)..(642): n is a, c, g, or t
  misc_feature (649)..(649): n is a, c, g, or t
  misc_feature (664)..(664): n is a, c, g, or t
  misc_feature (711)..(711): n is a, c, g, or t
  misc_feature (716)..(716): n is a, c, g, or t
  misc_feature (734)..(735): n is a, c, g, or t
  misc_feature (737)..(737): n is a, c, g, or t
  misc_feature (746)..(746): n is a, c, g, or t
  misc_feature (753)..(753): n is a, c, g, or t
  misc_feature (759)..(759): n is a, c, g, or t
  misc_feature (769)..(769): n is a, c, g, or t
  misc_feature (779)..(779): n is a, c, g, or t
  misc_feature (799)..(799): n is a, c, g, or t
  misc_feature (804)..(804): n is a, c, g, or t
  misc_feature (808)..(808): n is a, c, g, or t
  misc_feature (811)..(811): n is a, c, g, or t
  misc_feature (814)..(814): n is a, c, g, or t
  nbla-02969-r1
ggnggngntttnctnnngangcccttttgaaanncccttaggttttttactattttattatggcacacaggatagaggatggtacagttttcttacttcaaccaagtaattctcaaagcatccagctatttccatttggctaaagttactttttgcacatagcttgcatctgtttgagacttaccatgtacatcaacccaggtctagtaagcagaaatgtgaaaagttttgtttctgaggagacgcctcatctttacagaagccaatacactgagagccttcatagttccaatccattaccatcatggcaaggaagcactttacctatttgcatagcaacatatatttaactagaaataggtggtcaaagggattaagtaactttaaatggagaccactttggtttcaggttaaattaataacttatagagatcgctaaaaaacaaatattgaatgaaattagctgacaaagcaattggttcaagaacaaaggcagaatagcagatagtaatatcatctatatttattncacatcaatgccagaaccgtcttaactttacgacngaaaggatcntggggccgggatttgatgcaatgntcaancnggcaagctntcattggaatccaatntttccagtngancatgccnacaatggcaaggacntacagcctttaccttccccttaagggctataattcattactgggctngaccnttaaaggttaaaaggggnncnttaaggggnttactgnggaccnattcccttanacccctaatntggcccaggatgggggactnttccngganggnaanacc

SEQ ID NO: 77 - DNA, 866 bp, Homo sapiens
  misc_feature (2)..(2): n is a, c, g, or t
  misc_feature (4)..(11): n is a, c, g, or t
  misc_feature (14)..(14): n is a, c, g, or t
  misc_feature (16)..(25): n is a, c, g, or t
  misc_feature (29)..(29): n is a, c, g, or t
  misc_feature (31)..(31): n is a, c, g, or t
  misc_feature (600)..(600): n is a, c, g, or t
  misc_feature (716)..(716): n is a, c, g, or t
  misc_feature (736)..(736): n is a, c, g, or t
  misc_feature (741)..(741): n is a, c, g, or t
  misc_feature (745)..(745): n is a, c, g, or t
  misc_feature (837)..(837): n is a, c, g, or t
  misc_feature (857)..(857): n is a, c, g, or t
  nbla-03002-f
gngnnnnnnnnggngnnnnnnnnnnggcngnatcccgagcacgtgggcctactggaaaacttatgagtgtgttggatgtgggaaatcctttaggcacagttcagcacttcttcgacatcagaggcttcatgctggagagtaaaatttggaatataatgagtatgggaagatttgtatggaagcaccttttttttctcctaaattcctaggaatgtaagactcaatctgtagctagtatgaatattttgtattttgaacaagaaatgttgtgtcctaatgtgtcctagtctggagtttgatgccttatctgctgctcagtgggtgtaaccttatcccttctgagcctcagtttccccattccccccaatagaaaaatggggatatttcctagggttgtcctgagaataaaatgagttctgtgtgacagttaactgccattaattaattagccgttctaaaagtttatttacaatatcaaaatctgacaagtaaatcagcattgttgtttggtctcataatgtattgtttcttaagaacattttgtaattgggctatgattttatgatctacagacgtctatttaaactataatgtcctggnttaaataggataatacaatctaagactggtttgtccttgagaaatttcagatttaatcagagaaaaatgtactgattgggatttgagtggacattgtgggggtgtattctggatancctcaagatctcaattaaantttgntacnttccaatactagatctaaattgattttaagctccaagttcacttttccaattaaacgggaagcctccctgacataactgaataaaacctcanggttgtgggactccgggtgngtttaaggt

SEQ ID NO: 78 - DNA, 872 bp, Homo sapiens
  misc_feature (2)..(2): n is a, c, g, or t
  misc_feature (4)..(4): n is a, c, g, or t
  misc_feature (7)..(10): n is a, c, g, or t
  misc_feature (25)..(25): n is a, c, g, or t
  misc_feature (27)..(27): n is a, c, g, or t
  misc_feature (535)..(535): n is a, c, g, or t
  misc_feature (563)..(563): n is a, c, g, or t
  misc_feature (592)..(592): n is a, c, g, or t
  misc_feature (637)..(637): n is a, c, g, or t
  misc_feature (671)..(671): n is a, c, g, or t
  misc_feature (688)..(688): n is a, c, g, or t
  misc_feature (701)..(701): n is a, c, g, or t
  misc_feature (735)..(735): n is a, c, g, or t
  misc_feature (785)..(785): n is a, c, g, or t
  misc_feature (792)..(792): n is a, c, g, or t
  misc_feature (819)..(819): n is a, c, g, or t
  misc_feature (833)..(833): n is a, c, g, or t
  misc_feature (845)..(845): n is a, c, g, or t
  misc_feature (848)..(848): n is a, c, g, or t
  misc_feature (866)..(866): n is a, c, g, or t
  misc_feature (870)..(870): n is a, c, g, or t
  nbla-03002-r1
gngntgnnnntgtggcttttttttngnttttaagacgtagtctcgctctgtcgcccaggctggagtgcagtggtgcaatctcagctcattgcaaccttcatctcccaggttcaagcaatttctcctgcctcggcctcctgagtagctgggaccacaggtgccctccatcatgctggctaattatttttgtatttttagtagaggtggggtttcactatgttgaccaggctggtctcgaactcctgacctcaaatgatccacccacctcggcctcccaaagtgctgggattacaggcatgagccactgtgcccagcctgagaattaccttataaatatcttgcacatgtgcctaaagacaaggatgctgtatatgcagttttgcttacaacagaaaaataaaagccattaagtgtccaccaatagggaactaataatggtctattaagacaatgacacactgggcaagggtgggggaaagatcttatttactgatacaagaacaatctgtgagatggttaatccttaaaaaatggncaactgtgtatattatgctaccatttcnttaaaaaaagaaaaaagaaaaaaaaagtnaagagaagggatcaaggattgagaaaataagccacaacctggganggaaatatttgcaaaagacctatctgataaaggnctgttatacaaaatatncaagggacacttnaaattcaacaataagaaaatgagcaatccaattnaaaatgggcaaaacctccaacaagtacctcaccaaaagctttcagatggnaaacatntgaaaagatgctaaattcaaatattantggggaactgcagnttaaaacaattnatnccactacattcctatttnatantt

SEQ ID NO: 79 - DNA, 853 bp, Homo sapiens
  misc_feature (3)..(4): n is a, c, g, or t
  misc_feature (6)..(12): n is a, c, g, or t
  misc_feature (15)..(18): n is a, c, g, or t
  misc_feature (22)..(25): n is a, c, g, or t
  misc_feature (31)..(31): n is a, c, g, or t
  misc_feature (50)..(50): n is a, c, g, or t
  misc_feature (574)..(574): n is a, c, g, or t
  misc_feature (640)..(640): n is a, c, g, or t
  misc_feature (653)..(653): n is a, c, g, or t
  misc_feature (684)..(684): n is a, c, g, or t
  misc_feature (702)..(702): n is a, c, g, or t
  misc_feature (719)..(719): n is a, c, g, or t
  misc_feature (742)..(742): n is a, c, g, or t
  misc_feature (766)..(766): n is a, c, g, or t
  misc_feature (790)..(790): n is a, c, g, or t
  misc_feature (794)..(794): n is a, c, g, or t
  misc_feature (806)..(806): n is a, c, g, or t
  misc_feature (813)..(813): n is a, c, g, or t
  misc_feature (823)..(823): n is a, c, g, or t
  misc_feature (830)..(830): n is a, c, g, or t
  misc_feature (838)..(838): n is a, c, g, or t
  misc_feature (853)..(853): n is a, c, g, or t
  nbla-03037-f
ggnngnnnnnnnggnnnntttnnnngggccnggatcctctagcactggcngcctactgggccttcgcgccggcccttccgcgggtgatcagctggtctgcgctcccctgacgtgggctggggcacgtcaccgccgaatggcagcctccagaaagccaccgcgagtaagggtgaatcaccaggattttcaactgagaaatttaagaataattgaacctaacgaggtgacacactcaggagacacaggtgtggaaacagacggcagaatgcctccaaaggtgacttcagagctgcttcggcagctgagacaagccatgaggaactctgagtatgtgaccgaaccgatccaggcctacatcatcccatcgggagatgctcatcagagtgagtatattgctccatgtgactgtcggcgggcttttgtctctggattcgatggctctgcgggcacagccatcatcacagaagagcatgcagccatgtggactgacgggcgctactttctccaggctgccaagcaaatggacaacaactggacacttatgaagatgggtctgaaggacacaccaactcangaagactgggctggtgagtgtgcttcctgaaaggattcaaggttggtgttggacccccttgatcantcctacagattantgggaagaaaatggccaaagttctgaaaaantgccggcatcaacctcantcctgtcaaaggagaanctcgttgacaaaatcctggcaanaccgtccttaaacgccccttgaancctctcctcaaaatggggcctggntttnaaaaggaatctnctggaanggcaaaggtncaaaccnttcggttnaaaatggttaaaagn

SEQ ID NO: 80 - DNA, 836 bp, Homo sapiens
  misc_feature (3)..(3): n is a, c, g, or t
  misc_feature (6)..(10): n is a, c, g, or t
  misc_feature (44)..(44): n is a, c, g, or t
  misc_feature (549)..(549): n is a, c, g, or t
  misc_feature (629)..(629): n is a, c, g, or t
  misc_feature (638)..(638): n is a, c, g, or t
  misc_feature (640)..(640): n is a, c, g, or t
  misc_feature (650)..(650): n is a, c, g, or t
  misc_feature (665)..(665): n is a, c, g, or t
  misc_feature (685)..(685): n is a, c, g, or t
  misc_feature (693)..(693): n is a, c, g, or t
  misc_feature (724)..(724): n is a, c, g, or t
  misc_feature (754)..(754): n is a, c, g, or t
  misc_feature (762)..(762): n is a, c, g, or t
  misc_feature (786)..(786): n is a, c, g, or t
  misc_feature (789)..(789): n is a, c, g, or t
  misc_feature (798)..(798): n is a, c, g, or t
  misc_feature (826)..(826): n is a, c, g, or t
  misc_feature (830)..(830): n is a, c, g, or t
  misc_feature (836)..(836): n is a, c, g, or t
  nbla-03037-r1
ggntgnnnnntgtggctttttttggccttttcacagttctgacntttttattcactgatcataaatatagtctcatgagcattaaggtgatcatgaatgatgtactagcacctggaacatgaccatcatggagcactcactgattccccatcactggccaaagaagtcggggcatcttcctttcaccaagtgttcaactttggagggaccctccttctggtgcagcaattttattcttggcttgttctcaacaattaaaaaatcataaaagactgagtgtttgcaataaaatatcaaagaggataagaagattttctgttcttcttaaagtctaaagtaaaaaggggaggtagggaagaaggaaaggaaaggggaaagatgtcagggatctgccacgtttcttccttcctccagagcattttacaaaaacaaaaccggggaggtatttattaatgctgtttggagatgggttgcgtctctctgatgagccactcgagagcttcctggcggccctgtttctgcaattccttcccaatcacatccctgcangtcaagtggtaattgttgagccaatcgcactccttgtccgtaagagaatccacatctatcaatttggtctgaattgggancaatgttananggtcaaaggncaagcttccccgggntattaaaaattatacttggncctcaaanggaccacaagggcaacaatctcaatgcgaanttcaaaagcccaacctcaaaataacccggntcaacaantggcaaataatgccggcctccaanggntcaacaaanaaatgttttgtaactgatgccccaaggncccncatggn

SEQ ID NO: 81 - DNA, 1895 bp, Homo sapiens
  nbla-03066
gaagtgttacttctgctctaaaagctgcggaattcctcgagcactgttggcctactggaaaccaataatgattgttctgtttttctcaccctactatgtgaatatatattctgttagagatgggctgttatctgcaatgtggactcaataccatgggcttgagtttggttagttcatcattagagattttttttcagcagttggtttactttatgagaaaggatcatgagtttaattttcccactgatatatttgtgttctcattgctgagatataagtttcttaatgatttgttacctttttctattttcctagactagtattaaaattttgatggcatatgggtttggttccacttgtagagaataaatgttcacaacttactggtattagcacacacacatcacatgcagaaatggtgttttcttgccacttactctttctcataagatgcttatattcctgtgggcatttgtcttccacactacagcacataatttgatgaaactgattttctgtgcaagagcttgtgtttctccaactctggttttatggaccacttttcattggtatataggaggcggttaaaacgtggtggtagaatgcaggttttaggttagctgggtgtgaagaatcccaggtctttgggatagtcttggcaagttactcaactcctctaagttagtttcttgatctgtcagatgacagtaaacctcagagttgtgaaaattaaatggatataatgtgtgtaaagcacttagcataatgctttatacatcgtaaaactttcaaaaataggagtagtaattattacaaagaaatgtgaagaagagtcctagtgggctgcatgttaaaaatagtttttagttaatgaaaattaaatcacatcttagatgtttatcatctgcatggtacttttctggttgctgctttaacctttgtatagttgaaagtctgtaaactttctagtattctttgatttctggcccatttccctcctaccattcacgcttatattttttggttcaagtcaccattccttgcaaaactaattaaatacattcctaaatacataatattgccaatattcattcacatccaccacgtctagatccaagtcttcatcttctttatgctggtctaatttttgctgagccttagaagcaaagacagaccccgggggttgatatgggacctccagaatggggattgcacagaataatcttatttttcctctattcttctagtctgttatgttctgaacccacacatgttttcggaaggaccagatggctgacactggctaatgggaaccaaaagacgagtgaaagtaacctggttgtcacatacccccagcttagaggtgcttcaccctgccccaaggtcaatttcttttttctctagagactttaccccattatatcaaaaacctttactacagcctgactttatctgatgttagagtatcattaagtcaagcagcagcatttattgagtgaaaaaagattgtacacaggactggaagagaagcatctgcctttaaaatacagtagaaggccgggcatggtggctcatgcctgtaattctagcactttgggaggccaaggcaggtggattgcctgagctcaggagttcgagaccaccctgggcaacatggtgaaaccctgtctctcctaaaaaaaaaaaaaaaaaattacaaaaaatttgccgggcatggtggtgcacacctgtagtcccagccactctaaaggctgaggtacaagaattgcttgagcccagggtcagaggttgcagtgagtggagatcgcgccgctgcgctgcagcctgcgcgacagagcgagactatgttttttttaaaaaaaaaaaaaaaaaggccacatgtgctcgagctgcag

SEQ ID NO: 82 - DNA, 842 bp, Homo sapiens
  misc_feature (4)..(5): n is a, c, g, or t
  misc_feature (7)..(8): n is a, c, g, or t
  misc_feature (11)..(11): n is a, c, g, or t
  misc_feature (14)..(14): n is a, c, g, or t
  misc_feature (18)..(18): n is a, c, g, or t
  misc_feature (23)..(26): n is a, c, g, or t
  misc_feature (35)..(35): n is a, c, g, or t
  misc_feature (46)..(46): n is a, c, g, or t
  misc_feature (51)..(51): n is a, c, g, or t
  misc_feature (724)..(724): n is a, c, g, or t
  misc_feature (734)..(734): n is a, c, g, or t
  misc_feature (755)..(755): n is a, c, g, or t
  misc_feature (787)..(787): n is a, c, g, or t
  misc_feature (801)..(801): n is a, c, g, or t
  misc_feature (811)..(811): n is a, c, g, or t
  misc_feature (820)..(820): n is a, c, g, or t
  misc_feature (826)..(826): n is a, c, g, or t
  misc_feature (830)..(830): n is a, c, g, or t
  nbla-03096-f
gggnngnntgntgncgcnttttnnnngggcccgantcctcgagcangggtngcctactggtgtcatgtagagcttcacatgaggtgggttttgtcgattacgcccccttggaggtgtttatcatgtgcctctgtccccggtatttcctataaattgacagttacatctaggtgcctggtcagattctggttcagcttttacttttacttttttggcaagagcagttcaccaagggaggtgctaatgtccaactcgccttctgtgatgccagcagcttcctgatcagaggctgtggaattgactgtattgtgttgatgttttataaagagtcattcattaccttttagtcttgcgcttgctggtagaacaagatgttgtaggctcgttggaaacatttttccccagacccggtcatttatccaaagacctccagatcttctcagtgggaatgacatgaggagaccacaactgggctctctgtgttcagttttttccatggacaggtctagaaaccatgtattttacgataaaagacactggacttatacagatgcttccaagttcaacatcaagactagaagactattaaaaaattgcaaataactctatttctgccaaaagtacttttgggacagattcctaaaagtggaattgctggtcaaagggcaaacgtgtctatgacctcgccagatactgccaagttcacatgatgaggtcatgccanttgccgcaanccatgccacgggagaattcanccctccccaacttctccagctaaacttctganttaccaagaggcantatccaatgngcctttaantcaaanttcnccggtaagtgtg

SEQ ID NO: 83 - DNA, 839 bp, Homo sapiens
  misc_feature (4)..(4): n is a, c, g, or t
  misc_feature (7)..(8): n is a, c, g, or t
  misc_feature (10)..(10): n is a, c, g, or t
  misc_feature (13)..(14): n is a, c, g, or t
  misc_feature (22)..(22): n is a, c, g, or t
  misc_feature (25)..(25): n is a, c, g, or t
  misc_feature (43)..(43): n is a, c, g, or t
  misc_feature (526)..(526): n is a, c, g, or t
  misc_feature (565)..(565): n is a, c, g, or t
  misc_feature (631)..(631): n is a, c, g, or t
  misc_feature (648)..(648): n is a, c, g, or t
  misc_feature (661)..(661): n is a, c, g, or t
  misc_feature (698)..(698): n is a, c, g, or t
  misc_feature (741)..(741): n is a, c, g, or t
  misc_feature (783)..(783): n is a, c, g, or t
  misc_feature (789)..(789): n is a, c, g, or t
  misc_feature (800)..(801): n is a, c, g, or t
  misc_feature (808)..(808): n is a, c, g, or t
  misc_feature (823)..(823): n is a, c, g, or t
  misc_feature (825)..(825): n is a, c, g, or t
  misc_feature (830)..(830): n is a, c, g, or t
  misc_feature (835)..(837): n is a, c, g, or t
  nbla-03096-r1
gagntgnngntgnngcttttanggnccttttttttttgaaaanttaaacgtactttaaactttgcatgagaagaaaacaagaagcaaagtgaaaagtcctgtgacagactggaaaaaatattggcaattatcaaaatgaaaggttgctatttaatatatggtttctaaagtaaagaatagcataatttttatccctatagaaaaaaaaatctagagatatcaaccagtagttcacagaaaaagaaatccatcacagtagccaagatatgggatcggtcacagatgaggggataaacagaacatggtccgtatccacagcagagggctgtacagcctggtctgtttgcacagcggagtgcggtacggcctgctctatatacacagcggagtgcagtatggcctggtctatatgcacagtggagtactgtacggcctaatctatatacacagcggagtgcactatggcctggtctatatacacagcggagtgctgcatggcctggtctacgtacacagcggagtgcantacgggctggtctacatacacaacggagtgctgcacggnctggtctacatacacagtggagtgcaatacggcctggtctacatatacaacggagtgcaatacggnctggtttctatacacancgggagtactgtncgggctggtctatatacacagcggagtgctgcacggnctggtctacatgcacaagcggagtactgtacgggctggtctanatgcacaaggggggtgctgtgccacctggtccatatgcacancaaaantgctgtgttgnntcaaccnatatacacacaaatngnggtgncggtnnntc

SEQ ID NO: 84 - DNA, 846 bp, Homo sapiens
  misc_feature (3)..(5): n is a, c, g, or t
  misc_feature (7)..(10): n is a, c, g, or t
  misc_feature (12)..(12): n is a, c, g, or t
  misc_feature (14)..(15): n is a, c, g, or t
  misc_feature (17)..(18): n is a, c, g, or t
  misc_feature (22)..(25): n is a, c, g, or t
  misc_feature (33)..(33): n is a, c, g, or t
  misc_feature (48)..(48): n is a, c, g, or t
  misc_feature (726)..(726): n is a, c, g, or t
  misc_feature (762)..(762): n is a, c, g, or t
  misc_feature (808)..(808): n is a, c, g, or t
  misc_feature (820)..(820): n is a, c, g, or t
  misc_feature (828)..(828): n is a, c, g, or t
  misc_feature (845)..(846): n is a, c, g, or t
  nbla-03107-f
ggnnngnnnngngnngnntttnnnngggcccgnatcctcgagcactgntggcctactgggagtagctcagctcctattcctgggaagcctggaacggggacttttgaaaataactgcagcggcattcgggttagggtccgtgctctccgcctgcgccaggacagggtgaagtggtcggggcgagcagagggtgcgaaggtgcgggtgctggtgcctcgcagcaggagggagccccggctgcgccgcgcgactccctctttggccctcggagcgcagcacccggcggacaagcggcgggacgccaggacgcggcgagcaagatctctcgtggaagaggaagaccaacacatgaaattgtcccttggaggcagcgaaatgggcctctcatcccatttgcagtcttccaaggcaggacctacacgcatctttaccaagcaatacccacagttctgtggtgttacagggctttgaccagcttcgacttgaaggattgctttgtgatgtgaccctgatgccaggtgacacagatgatgctttccctgtgcatagagtcatgatggcatctgctagtgattacttcaaggctatgttcacagaatgaaagaacaagatttaatgtgcattaaacttcatggtgtgagcaaagtcggtctaaggaaaattattgatttcatttatactgcaaagctttctcctaatatggacaaccttcaagacacctggaanctgccaatttcctacagattctgccagttttggacntctgtaaagtgttcccaaaaccggggtcactttaacaactgtgttnaatttggccggnttgcaaanactacaaatctaaccgnn

SEQ ID NO: 85 - DNA, 836 bp, Homo sapiens
  misc_feature (3)..(3): n is a, c, g, or t
  misc_feature (6)..(9): n is a, c, g, or t
  misc_feature (24)..(24): n is a, c, g, or t
  misc_feature (50)..(50): n is a, c, g, or t
  misc_feature (615)..(615): n is a, c, g, or t
  misc_feature (682)..(682): n is a, c, g, or t
  misc_feature (720)..(720): n is a, c, g, or t
  misc_feature (734)..(734): n is a, c, g, or t
  misc_feature (744)..(744): n is a, c, g, or t
  misc_feature (763)..(763): n is a, c, g, or t
  misc_feature (798)..(798): n is a, c, g, or t
  misc_feature (803)..(803): n is a, c, g, or t
  misc_feature (806)..(806): n is a, c, g, or t
  misc_feature (816)..(816): n is a, c, g, or t
  misc_feature (836)..(836): n is a, c, g, or t
  nbla-03107-r1
ggntgnnnntgggctttttttggnctttgacattaaaagtttttattggncacaaaaagataaaacatggaagttgaatttactgagcaaaagcagctctccaggtgaagctgctatactttgtgctaaataaccttatgaactgagtatacagaatacatataatatgcaagttacctcaacagcaaaggagaaggagtagaatacagtttttgaagataaaatctggtcaagtgacaaattttgttgctcaaaatttctagcccttatccacctaaattctgtatggttctacatatatgcattcagtatgtgcatactgaattcccattttaatggaagctgctttttggaagaattctttttaatttcacatttctttgatgtgccactcaatttttaaaaaaattatatttgacatatgtgcatgtgtgtatgtgtatgtatgtatacacactttaaaaacaccaaacccttgtttataagtagagggttcatgctgctttttaaattaatattagtgaatttaagctacttctcctgtgtgtctaggaaactttgtgttctcaatgcacccacacagtcaagtgggttgacagatatgtcaaaaatacnttatgaaaagagggaggtagctcatgcgagttggcaaccttttgtgtaatggttcctgttcaagcangctgcctccctttgacatcctacagtcaaagatgaaangggaaacttttacntgaagcctantggagcacaagttgtacanttacaataatccaccttcaacttggcttatggggnttacnaangtaaggatgncaaataccttacaccaatan

SEQ ID NO: 86 - DNA, 2896 bp, Homo sapiens
  nbla-03113
ttctaggcctgtacggaagtgttacttctgctctaaaagctgcggaattcctcgagcactgttggcctactggggaacagcattatgatagatttttcagtgaatatgaaaagttacttcattcagaaaattatgtgacaaaaagacagtcactgaagcttctcggtgaactactactagatagacacaacttcacaattatgacaaaatacatcagtaaacctgagaacctcaaattaatgatgaacctgctgcgagacaaaagtcgcaacatccagtttgaggcctttcacgtttttaaggtgtttgtagccaatcctaacaagacgcagcccatcctagacatcctcctcaagaaccaggccaaactcatagagttcctcagcaagtttcagaacgacaggacggaggatgagcagtttaacgacgagaagacctatttagttaaacagatcagggatttgaagagaccagctcagcaagaagcttaatctccaataaacatctatgttaaatccaaattcagcatttgctgttagctattcagcatcaggcactcattgattcatgaggaacattactgctaatctgctgttaagtgaacggtttttcattttacccttttgtttttcagtccaggttggagatcgtagctgctgctgcttgcacactagggcacatgtgggctttctcttgatctttgtgtcatttcagaattcaaagactgtgctacgggagttctgaacatggctgggttcatgaaggcaaatgtatggatgagagtgtggtttaggaaagagggcactgatatcagattagacctatgtgtttgcacccatctttgttggcgatctgagtgcagtgtggcaagtgcacacctggcatccctgcgtcagatcgcgcaccttcaggtcgcgcaccttcgctgaaggaagatgacgcagagctttatctgaaatcagaggggagctatccaaaatgggagtttgggggcagctaaagttgacatgcgaataaattgatactgaaacttagcaacttcttaaaagtgtaaagaagcctcataagatcataaggaaaatgtatatatgcttttcacagctttctagaattttttgacatttgattttcttgagacttgtaaacctggatatgttgaagggtatttgttaattttacttttcaaagatactttaaaacagtagagctagcaatgacaccttgcatttcatttcaacactgcttcaaggtttcttttgtatataattcttagaatgctcatttcttttaaatggtttaatttgtacagcagagaaatgttattgtagtagtatgtaactattacctaatactgagtttttgcaaaaaacaatgaatgctcatatgtaattgaaatacttcagatcacatgaaaatgctgatttaacatttaagtatcacagcattaaaagaaaaagaaagtaaaccagtcctttgtattcagttacctaatggggtgccatcaataagctgcgatacagccctggagctcagtcagccacaccttcctgcatcctattggccttattcattttaaatgagttaatgaatctgccagatctgtgaatgatagagattatgctaaattaatgctgattctttgtgtgtgtgggaaatctctgtagagcaccttttctttcttagactaagtaacccagtacaatagttgtgaactgaataattaaaactttggcttctcttaggaaaagacgacttcctagtcataggtgtcctatggggaaatttattttttttaatgtcctgttccttaatgctgcaaattatcagtatttataaagtaactgattttgcaccacttttttgttactgtgaccacggcagaacaatgtcttctagactatatctatgtaaagttattagaatggtatctgttcattttagtgatatgaagatcacaactaacaactgacaaatcagagtttgccagttcaaattcagcatggctgcagctgattaagaaattgatatgattattctttgctagcctctcttactaatggaattatatactggccagtaaaatgggcctcccaattgctgtttcagcaggttttaaaccttcaggaacaccagttaggaaaatagctccagaaaatatagatatattttatttttattaaaatggcagtctacatcataattggcatttctcaagactgtctttaccagaatctgtgtgaaataaggcaatctagtctccttgaaaaaaaaatctcttggatgtttaggaaggaagacttggccgtgatgtggtgtcctggctttgtggtgtagtgctgtgtgtatggagttagtgtaaaaacatggattacaccaagtggaagaaacgtcttcttgccaagctcattcttagaacttacacatctagaacagcttccactttggcagtgaggtcgtagccttttaggtggaagaagtgagggtgcagcgtgtcagacacaacattcatgttactcttacattggaatctgaaggtagttcagacttcgtgggttttgtttttaagcaaaacaatgtgaaaacatttaagtttgaaatgttgcatttgaagttatgatcatttaatatattcatattaccaagactattatactggaagtggtttttgtgttataaaggtttaattttacataaggcagttacttaatgtgatttttaacccttaaaaaagtggagatgtatacatttgttaacaatgccatgaaagcattttctttctcctaaggaaaagtgaatttcttatcagaatatctggctggccctgtaatttaaattaaaataaaattttggagaaacaaaaaaaaaaaaaaaaaggccacatgtgctcgagctgcag

SEQ ID NO: 87 - DNA, 779 bp, Homo sapiens
  misc_feature (8)..(12): n is a, c, g, or t
  misc_feature (18)..(18): n is a, c, g, or t
  misc_feature (392)..(392): n is a, c, g, or t
  misc_feature (475)..(475): n is a, c, g, or t
  misc_feature (497)..(497): n is a, c, g, or t
  misc_feature (551)..(551): n is a, c, g, or t
  misc_feature (563)..(563): n is a, c, g, or t
  misc_feature (572)..(572): n is a, c, g, or t
  misc_feature (667)..(667): n is a, c, g, or t
  misc_feature (675)..(675): n is a, c, g, or t
  misc_feature (709)..(709): n is a, c, g, or t
  misc_feature (721)..(721): n is a, c, g, or t
  misc_feature (725)..(725): n is a, c, g, or t
  misc_feature (741)..(741): n is a, c, g, or t
  misc_feature (751)..(751): n is a, c, g, or t
  misc_feature (760)..(761): n is a, c, g, or t
  misc_feature (763)..(763): n is a, c, g, or t
  misc_feature (766)..(766): n is a, c, g, or t
  misc_feature (776)..(776): n is a, c, g, or t
  nbla-03119-f
gagggggnnnnntttgantcctcggcactgttggcctactggtttatctcaattttcaacagatttgctgcaatagaaaagttatctttttttagatttaagagctccaaatagcactgtagcctacattaagcatcaagtgccccgttcccttcacaaaagttttctggttcattcgagtcactgaattccaaataatgcacattgggttaccaacattagtcgccactgtcatattcagaaattaatcctaaatggtttacagtccttctcattttttctctttcaattatgtgacatagtccacacttttcattaaagttattaataatataaggatcttaggtggcaattttctgcacagctggggaaaagttgcatattcagtgtangtatgcagatgcttactgaatcccagagacataaatggtttattcccaggaatagtcctaccttgctattggttaataaaggnctaaattagattggcatcagtncaacaaagcattcatttttatttatgcatctcgaatcacttttatacatatgtnaaatgaacacantttgagagnttaataaggtttataaattatacttctagataaatgcactttttgagaaagacaagaaaaataattattttctgatggatttccattagccaaangggcctanaacataaccagggcaaattattggaatgcccatnagggaggacttnccanattgctttcctttggnacaggaactntttgaacgnnanggntttgaaaatnacc

SEQ ID NO: 88 - DNA, 734 bp, Homo sapiens
  misc_feature (72)..(72): n is a, c, g, or t
  misc_feature (482)..(482): n is a, c, g, or t
  misc_feature (492)..(492): n is a, c, g, or t
  misc_feature (513)..(513): n is a, c, g, or t
  misc_feature (593)..(593): n is a, c, g, or t
  misc_feature (607)..(607): n is a, c, g, or t
  misc_feature (610)..(610): n is a, c, g, or t
  misc_feature (652)..(652): n is a, c, g, or t
  misc_feature (656)..(656): n is a, c, g, or t
  misc_feature (666)..(666): n is a, c, g, or t
  misc_feature (679)..(679): n is a, c, g, or t
  misc_feature (681)..(681): n is a, c, g, or t
  misc_feature (684)..(684): n is a, c, g, or t
  misc_feature (689)..(689): n is a, c, g, or t
  misc_feature (693)..(693): n is a, c, g, or t
  misc_feature (707)..(707): n is a, c, g, or t
  misc_feature (710)..(712): n is a, c, g, or t
  misc_feature (723)..(723): n is a, c, g, or t
  misc_feature (726)..(726): n is a, c, g, or t
  nbla-03119-r1
gagttttgtcgcaatttctagtagtgacaagtagaagtaatgctagaagacttgtgccattagtgcattcanatcactgaatttttcatgatcctgcttccattcacaagtcctttattttacactggttccaactttgattttccattggtattttgtcagaccaagccatgtgactctttcttccttggatgcaaaaccaagtagttggaaaaatctttagggcatctgtaatctatgggaatcaaataattttgcatccaatccgtaaatttatgtatgtgtctggagaattcaaacaccccagaatgtttagaaaactagctgacagctcggtaaaggaagtatgctttcacttggtcacaaaggtttgttcatctctcaaatagtgtattaatagatggcaacagagtttaaatgcttttggaagatccttagccaggtatgaggaaagcctcaagagagtgcaagcttattatggngttataaggnttatcgggataatacactttngagagcaatgttcatgatttatcttcatctgatgaagaaaagacattttctaacacacattatcgagttaaaattggggnaaaaaagaattttntgnctcctattttatagcaaatttgggatccttttggctgaaaanttanttggttcttngattaaagctggntnttnattanttcnttaaattccagccnatnnnaaaagaattantgntcttttgg

SEQ ID NO: 89 - DNA, 722 bp, Homo sapiens
  misc_feature (26)..(26): n is a, c, g, or t
  misc_feature (41)..(41): n is a, c, g, or t
  misc_feature (72)..(72): n is a, c, g, or t
  misc_feature (74)..(74): n is a, c, g, or t
  misc_feature (89)..(89): n is a, c, g, or t
  misc_feature (279)..(279): n is a, c, g, or t
  misc_feature (515)..(515): n is a, c, g, or t
  misc_feature (628)..(628): n is a, c, g, or t
  misc_feature (630)..(630): n is a, c, g, or t
  misc_feature (638)..(638): n is a, c, g, or t
  misc_feature (640)..(640): n is a, c, g, or t
  misc_feature (655)..(655): n is a, c, g, or t
  misc_feature (659)..(659): n is a, c, g, or t
  misc_feature (711)..(711): n is a, c, g, or t
  misc_feature (714)..(714): n is a, c, g, or t
  misc_feature (722)..(722): n is a, c, g, or t
  nbla-03169-f
gggaatagaaaaaatcacacaggttngcatggcctcattgnttgaactagatcaaagactctttgaaaattncntcgagttgaaagcanatcccatcgttggctccttagaacctggaatttatgcaggatattttgattggaaggactgcctgcctccaacaggtgtcagaaactatttaaaagaagcactggtgaatataattgccgtgcatgcagaggtgttcaccatttccaaagaactggtccctcgggtactatccaaggtgatagaagcagnttctgaagagctcagtcgactgatgcagtgtgtttcatccttcagcaaaaatggagctttacaggcgagacttgaaatctgtgctttgagggacactgtggctgtttacctgacacccgaaagcaagtcaagttttaagcaggctttggaagccctgcccaactttcagtggagcagataaaaagttactggaagagctcctgaacaagttcaagagtagcatgcacttgcagctnacctgtttccaagcagcttcttcaaccatgatgaaaacataaatatctggcacataaaagaagtccaggaaaataacacgtaataagactggtcactctctaagtccctaaangnattttggngnattaaacattggggnttgncatttttctcttttttctttctctgactttgaaaaatggtgggatacatttnaanccaaatgn

SEQ ID NO: 90 - DNA, 714 bp, Homo sapiens
  misc_feature (27)..(27): n is a, c, g, or t
  misc_feature (40)..(40): n is a, c, g, or t
  misc_feature (69)..(71): n is a, c, g, or t
  misc_feature (494)..(494): n is a, c, g, or t
  misc_feature (573)..(573): n is a, c, g, or t
  misc_feature (596)..(596): n is a, c, g, or t
  misc_feature (614)..(614): n is a, c, g, or t
  misc_feature (643)..(643): n is a, c, g, or t
  misc_feature (672)..(672): n is a, c, g, or t
  misc_feature (681)..(681): n is a, c, g, or t
  misc_feature (698)..(698): n is a, c, g, or t
  nbla-03169-r1
gctgaatgtgctgtagtagatattttnaatatcacaaacnttcatgattgcagggggtaaacttagctnnnagttgagttagatacaacagttaacatacttaggaaagacaattcttaacagctttatcaagcacatttgtgaaagattaaactttcatttccagttaccatgatgtccccccatacaccaaatgaaccaacacatttatttattttaaataatggaaactgtcatggctacactgtgctctaaaattacttgcattaatgaggacattaattttagcatttaaaaaaagagatttaaaaataaccatagaaaaacttgaaaaccctgacaagccgactacaaagagaattcctctctgaaaattttcagatgcgacggtatgagggagttgggtgggctgctgactctgagagaagtcccggtgacctgaacctattccagtgaagccagtcagcagtgaatgtggggcaagtgcatgcggntggctacagttccattgcctggtgaccaaggagcatcctgaagtttcagagaaaaaactgtgtgacagcagcattggtncaactactgagcaagatccttancaggtaaaaaagtggcanaaacagtcacctgctgaaggaacgggcanggagttggccgtcacgcggagcctgggcntttccgtangggaccctgaaatttgngaacggcccgccaaac

SEQ ID NO: 91 - DNA, 1803 bp, Homo sapiens
  nbla-03199
cactgttggcctactggcagatgccaaaaaagatgccaacagacactacattaccctaatggctgctacccagaacctttttataggttgttcttaatttttttgttgttgttgttcaagcttttcctttcttttttttcttggtgtttgggccacgattttaaaatgacttttattatgggtatgtgttgccaaagctggctttttgtcaaataaaatgaatacgaacttaaaaaataaaagctggtatcttaaaatgtaagagagtaagactgtaaagcctaaaatgactggctgagaatgaaccagaaatgccatttgccaaacagttgtaactagaaatttgattctcacggtccattcttttctttgtccttaagatgacattgttagtgttcacgtcccatgttcagtgtccaaaccggcaatgtaaaaagtatcctgtgtggtttaacaggaaatctgtttatgtctctttatttgaaaccagttttactctcagtggttctttaagttcaatgaagtctgccaggaacattggttggtagtattattccgacacctttaatttccaaaatctgaagttcctgctagtttaccaccttcatgatcttcttgaactggtaactgattaggttgaacttatggaagatttgtggacttaactcaaaagtaacctctcagtgttctatagaacatgtatttgtgtaactgaacctaccaggagaaatgtttggaattctatatgtgcaatttttcaacaaatgcaaaaaaaatacagcacatgtattgacaagcttctgtcaagcagcttgagttgaaatttgatttaagaaaataaatcatgattgttcaaagctgctgggacgttagaattaggccatgatactggtctcattttaactacagtggtatttggcactagtgtaaacttccatataaatcactcttttggaacaacaaagggggagggagaaaaatcacggcctgttaaatgagtaccaaagccgcccaacagtaatgagatgttctcatccttgattctcccagcctcaaacaacacagcttactttttttttcccttgctcagaaagtacctgtaatttaacaaacagactgcctgtaggtatagtgcaattacaaatgctctaatcattgtacatacatctctcttgatattgcagcatccatactggctttgtaatcattaattttttggcagattgaatgtgctgtattgatatgtatctatgtaattgtattgtatgtctatagctaattcacgttttgaataatgttattttatttacttttttaagagaggagaatgtaaatttgtcagtttatttctgactagggatattttctttccatttagaaaagaagaaaaaaaaaaaaccttactgtcatacagagcggtactagcgtcgtgctgtataaaatcatttgcacattcctgagtagaggtatactgattataagacccaaaggtaatttcatagcaaaatacataaaatcagtcggagcttttatacaaacatggaaaccaactttgtagaacttttgccatttgatctaggattggaatatgagcttttatacaattcatattcttatttggcaaatgcacagtttagtattacctctctgatggcctttactagaaaggcagttttagaagctattgtgatccactaaggaaatgttttaacagctagagaccactgcttgcctgaaagggcgttcttaaatttggtgcagcaaaaaaaaaaaaaaaaaaggccacatgtgctcgagctgcag

SEQ ID NO: 92 - DNA, 2295 bp, Homo sapiens
  nbla-03212
gcctactgggctgtgatttataagatgtatatgctttctatgtgaatataagcttgtgcacaatgtttaaaagaaaaacaatgaattagaagagatcccccgtcccccagtctgacatatttcatacagaatgtttaaaagaaaaactctgctagtcttggcaaacatttggccatgtgaggcatgtggtcagtttccattttctattacctggaaagggccataaggaagcaggcagggcttaggtagcttggttacctaagttagaaagtaagagaatcatggttcggatatgaattgaagtggttggtacatggatacctgttctttaaaaggaatgtgggagatgagtcaagggtgaggccgattgttctgcccatgccctaccataccaatttcaataacaatcttgcctgtcattgcactcagaatcttaagatcatgtttcaaatatgtcgattcaaacttgcttctaagcctgagtccagggatagcaatggtactgaccagctatggactgggagaacattgagtcctgttttccattggcttcagggcgcatccatgtggatataggaaaagcctctttccacagacttaggaagccccccgaccacgcggacgctcgctgggctgcactcagcaggctgcttgagtgggagctgactccaacatgccctgccctggctgggactaggcatgcttccagcccttcccgtgctctccctgctgtcaacacttgcgtacaaacctgcctagctgttgtaagttttcatcagtagcttaagtactagtagcaaaaacttaaattcattcagaaagttgccacttctgaatgagtagagcaggaaaagtaaactttactgaaacataatttgctgcaacagtcaacattgttatgctgaatgtgctctcaactgccctttgctcatcgccagatttattatccagtgtattcctaacagtcttttgttgtcgttgtttttaaaacaaaggtacggaccatgtgctatatataaatcgaatggcttaaactaatttgctatgatcctctaacaccgaaatttcccataaacttaagtgcctacacttaggacttttgaactttcagtcatctttttcgtggtgtctcactgaacgatgtgttagaacatgtgttccatttggagttttgggcctgtgcacggtcaaccccaattaccaatttagttgaggctggattcgattgctcagttcacctgccacgttctctccaaggagtggggtctacgtgacctttagtcctctacctcagagccccgagtcatttctgaccaccccgttctgtgtcctcactcttgtccctgaatgggtccctgtgtggatctcagtgtgtgtgtggtttctccactcctccccgctcatgtcccacacctgccatattgaaccgtttctgcactaatcttctccacgggcacggagtggagggaacgtcttgggaaaggggagagcttgacctccatctaggtttcttttatctggagaaaaagaacacttttgaactatgtaatgcttcgccctgaaaggcaagctaacgctaacttcccaggtgacagtagcaggaacaaggaagggtaatgtttccatgacagacacttgcttcccttgggacaagtcccagaagaactacctgaagcaccaaagctccccaccccagcctggtggcagaggaagcaggtggcaccaactcaccaaagggacttgggagccaccttctcactctgtggaagtactttagtgagagctgactggcaagataaaaaccctgaaattcccagaagttacagatgccttaaagactttctttggaagatcattgcctgtactattccttttttgtgtggcataaataatatattaacctgttacaactgacaacattggttttctgcagctagggagtcttgagtcgagactgctcgccttgatgacttgctcttttttggcagatgtgtggagttggctgttacgacatccctgtgtgatcccagaggaggggcagtagctgggcagaaactgcaggcacacatttgggtggatcacctggcttccagccccttcggggtggtgctcagtgtggggtgatggtatcatagaggaccacggcgcttatcagcattgtttctttggagtctgtgtaatggaatgtatttttcaaatactgatatttgcattttctgtaacaattccttataataaaatgaagtaaaattgtgaaaaaaaaaaaaaaaaaggccacatgtgctcgagctgcag

SEQ ID NO: 93 - DNA, 750 bp, Homo sapiens
  misc_feature (15)..(15): n is a, c, g, or t
  misc_feature (44)..(44): n is a, c, g, or t
  misc_feature (61)..(61): n is a, c, g, or t
  misc_feature (76)..(76): n is a, c, g, or t
  misc_feature (78)..(78): n is a, c, g, or t
  misc_feature (94)..(94): n is a, c, g, or t
  misc_feature (556)..(556): n is a, c, g, or t
  misc_feature (559)..(559): n is a, c, g, or t
  misc_feature (573)..(573): n is a, c, g, or t
  misc_feature (593)..(593): n is a, c, g, or t
  misc_feature (607)..(607): n is a, c, g, or t
  misc_feature (653)..(653): n is a, c, g, or t
  misc_feature (669)..(669): n is a, c, g, or t
  misc_feature (678)..(679): n is a, c, g, or t
  misc_feature (694)..(694): n is a, c, g, or t
  misc_feature (702)..(702): n is a, c, g, or t
  misc_feature (716)..(716): n is a, c, g, or t
  misc_feature (730)..(731): n is a, c, g, or t
  misc_feature (733)..(733): n is a, c, g, or t
  misc_feature (737)..(739): n is a, c, g, or t
  misc_feature (741)..(742): n is a, c, g, or t
  misc_feature (744)..(744): n is a, c, g, or t
  misc_feature (750)..(750): n is a, c, g, or t
  nbla-03213-f
gttggaagcaagacnatacagaaagctgctctaaaatctcactntttgatttcaccttcgnttactatgaaatgtngnatcagacctgacatgnctgagataaccccgtgattcaggatttgatcaaaagaagtctagtaagaattaattacacagaagcctcctttcatttctatgggccaaacaaaggccatggataaccctacccgctttatgtcattacccattgggaaacacaatggctacttctgttagggtacattgaccttggtcaagcatcttaaagaaggcaaccctaattgagagctgtcttggctaatactctgcaccacaattgtgatgtcctagtcctaccactagagggcatggtacagcctggcaaaagttaaaaggggtgtggcagctcccatcaggtctggaggtggtctataagcacagttgacagttgtgcattgggatgggtggagaaagacgacaagagagcagagaatctgctgatgtggctgcgcttacttttagtgactttatgtacttatattaacagctggaaataggntgntgggttttgagcangctggtatagtgaggaatgntcatttttaaatgncctaacagattttgctttgaaaaatgcttggtcatgaataatttgnggccagggatgctttntgaagcagnntagggaacatgaatnttcaagangaaatccaaaaatntgttaagggcatanngntaannncnncnaggaan

SEQ ID NO: 94 - DNA, 743 bp, Homo sapiens
  misc_feature (77)..(77): n is a, c, g, or t
  misc_feature (437)..(437): n is a, c, g, or t
  misc_feature (444)..(444): n is a, c, g, or t
  misc_feature (520)..(520): n is a, c, g, or t
  misc_feature (529)..(529): n is a, c, g, or t
  misc_feature (556)..(556): n is a, c, g, or t
  misc_feature (573)..(573): n is a, c, g, or t
  misc_feature (583)..(583): n is a, c, g, or t
  misc_feature (599)..(599): n is a, c, g, or t
  misc_feature (606)..(606): n is a, c, g, or t
  misc_feature (632)..(632): n is a, c, g, or t
  misc_feature (640)..(640): n is a, c, g, or t
  misc_feature (661)..(661): n is a, c, g, or t
  misc_feature (664)..(664): n is a, c, g, or t
  misc_feature (668)..(669): n is a, c, g, or t
  misc_feature (675)..(675): n is a, c, g, or t
  misc_feature (677)..(677): n is a, c, g, or t
  misc_feature (690)..(691): n is a, c, g, or t
  misc_feature (695)..(695): n is a, c, g, or t
  misc_feature (706)..(708): n is a, c, g, or t
  misc_feature (713)..(713): n is a, c, g, or t
  misc_feature (716)..(716): n is a, c, g, or t
  misc_feature (721)..(721): n is a, c, g, or t
  misc_feature (724)..(724): n is a, c, g, or t
  misc_feature (727)..(728): n is a, c, g, or t
  misc_feature (730)..(730): n is a, c, g, or t
  misc_feature (734)..(734): n is a, c, g, or t
  misc_feature (736)..(736): n is a, c, g, or t
  misc_feature (739)..(739): n is a, c, g, or t
  misc_feature (742)..(743): n is a, c, g, or t
  nbla-03213-r1
tgcttgatgcatttagagacaattccaagggcaagcactggattttgatattatctgctttgtagatatttgtacgnaagactgttaagactacatggccagtccccactgcaggaaacagaatgattttcttttttttttattattattccctgccaatagcattttccatctaacacatttaaattctcacagcataattgcaaacatgtacatattggttcccacgagaaatctgcaggtgacatttcgggatgtttggagtcaatcagataaagcacattatgacagaaaccataagaggggagctgggacctgggactgtgcagaatgaaaagccacggctacgggaagcataagcttgtgctgcaacggcatgtgcacatgacctgctgctcctggcctctacgaagcatgcccagcaagggaacctcctncgccctnctcacgtgcttccttcctaaggctgagagctcaactgaagaccttcccaataaatgacagatggctcttcagtcangaatgcagntagtgggttcatgacagacacactggncccacccggcttcctgntgaccaccantctgaataacacctgnccaatgngggatgacatcagctaggaacaaagnaattggcngggtgatgatatttttatccnaangatnncccatntnaaggaaccccccnnttanggctaacaggnnntaccnggnctggnagntannanaaananccntcnn

SEQ ID NO: 95 - DNA, 3049 bp, Homo sapiens
  nbla-03219
gaattcctcgagcactgttggcctactggaaatttaaaaatagctacgaaacggtgtttttaaagttgaggtctggaagacctggctcggggtctgggaaggtgggtcttttgtgatgtggtccccgggcggtgcacttgggagccatggcggggccaggacctctggcagcgcagggatggagcccgcaggtgatgagcttgggaggtgagttgtggaggctgcgctcacatcaatgcccagtgccctccccgaggggcctggttctctctccacaggggcgggggaagcacacaggggacagggaggggtgctgggttctctctcctcgggacagggagcgcagccaggttctctctcctcgggacagggtggtgccgttgcgtgcattccccagctgcagccacgagaaacaatttggagcggaacccgggctctgacctcccctcatcctcagccttcccccagggatgggccgtgagatgaatgtggtcaccggcccaatccaggggtctatggccaaaccgcagacccggaggaagcaggccaggccatctggggagccggctcccctcctctcctcccctggctcccacaaagctgtctcatccagaagccaggcccgcctgtgagcaaggggaggctgcaggtgttccttcagcctgaagcgtgtgaaagccaacagcccccaccctggtctccagccgcagccccctccccagactcagggggccaaacccacttttcacagccatctgtaacccaaacgtctgcccacagctttgttcgagctcagtccacagtgggccgcgtggcctgggagcgtccagtggcagctggggcctgccaggactgctgcccccagatcgctgtttgctgtgtgtgtggctctgtggggccccggctccacgataccctcaagcatctgcctcccgctcttcccagattgcagggcatgcctggcaagactgcgcagtgccgctctgacgggcctgatctgaacctgggctcggggggacaagggaggggactgagcacgtgggatggacagagatgcacacccctcccaggcaggagaggcagagctgcttctgacacacaggcagttatcagggggaagagaaggtgggcagaggagccaccccatctcaaggcagcgtgcagggcagagcctaagagagggtcctcctgcaagggccagacaaggaggagggcatgggcaggaaccgcgtccaaatcaacagcaaagacaaaggtcacctagaaagggggactccaccagactcttacccagcagcacgtccctcctgcctgggcctggtgagcgaggggctcaaggggaaactgaggcaggtgctggcacttctgtgtgggtgaggaggacaccaatctgaggccccgcccgctccctgcttcggctcctctgtgttcccgggctgccgactctcaggaggctttgccacctgaagaacagggaggtccagcaaggtaagaagagctttccagctcctgttccgacctgagagccgagaggcaccatcctgaagaatggccttggtcccaggcctccatgtgcgctgtggcagacaatgccagtcgatcacctctctttcctgacccagacacagcctcatgctcttcagccaagtgccccagggaagcccgccaccgatcagtcaagcctggagtaaaagatgaagcctatttgcttcgctgttttcacgtggggcttatcaagtatttactaagcaccttctagaagcttggaaagggctacaagccatggtccctgagcccaagacacttacaggtttgctttctgggaggattggggtggattagagactgccttccagtcagtgaccacaggatgggccatcttggtctctgtccgtatctggtttgggggttttcgcaggactaggcctaggctaaggacagggagggcacaagttctggctgggtccagggtcctgggacccagggccatttgggacctgtgagaatggatggacagcatgggatggggcatgtggtctgagccctcagtagattcccttcaccctcttgttgttggggtcgaagggcgacttcaggtgagcctgggcaccataggtcacccccattctctccagggcatagtccccgctcttcacaaagtccagcgagacctaggagcagaggtggggatgaggatcactctctgttggtaggtacagggctcacgtctgcctgcttctctggaggagggggtcttggtcttgctacctgccctgtgggcaaactcatccctgtgccagggactcctttctgaacccaggcattgccccagagcaggtgcagttcgtgtccatgtgatcttgagttggacatgggcatctggggtccggcaaagccaaggtctggcagccaatatgacttccaccggacaacacacctcccaccccagcaattccagatgcctgggaaacagcagcaacacggtggcttccccggacccgggcaagcacagcggccagagcagcgccgaggctgggggccaatccggctcgaatccctcggggcaggggcggctggaacagccttctagacagcttggcctctgcatgctccccatcccacaccctggctcgggctccccagcaagccctcgggagccagtcagccccaggtgcaggtgctcttaggcaggaggagggtgtcacctccagcctggcacagctggtgacgcctggcacttttgctgcagctgctatgaggagggcaggctaggccactcagggaagctgttcttcctttacagcaattaaacccaaggtcagggccacaggagggagtctcgggctccgctctgggagtcagagggctccttcttgttcctagcagctcaggactggatgaaaaaaataaaaaacaaaccaagctttttcaaaaaaaaaaaaaaaaaaaaaaaaaaaaaaaaaaaaaaaaaaaaaaaaaaaaaaaaaaaaaaaaaaaaaaaaaaaaaggccacatgtgctcgagctgcaggtgcgcggccgctagacta

SEQ ID NO: 96 - DNA, 754 bp, Homo sapiens
  misc_feature (48)..(48): n is a, c, g, or t
  misc_feature (78)..(79): n is a, c, g, or t
  misc_feature (484)..(484): n is a, c, g, or t
  misc_feature (696)..(696): n is a, c, g, or t
  misc_feature (699)..(699): n is a, c, g, or t
  misc_feature (701)..(701): n is a, c, g, or t
  misc_feature (747)..(747): n is a, c, g, or t
  misc_feature (749)..(749): n is a, c, g, or t
  nbla-03223-f
cttctttgatatggataatggaccgagcctctgtttgcaaattatttnagtatgcttgccataagaagtgctgtctgnnaaccacagccaagtgctctaaaaagtatgatccagagctgtcatctcgacaatttggggttgaactgtcccgtttgaccagtgaagaccgaactgttcctttagtagtggaaaagctcataaactacattgaaatgcatggactgtatacagaaggtatttatcgaaagtctggttcgactaataaaatcaaggagcttcggcagggtctagatacagatgctgagagtgtaaatctagatgactataacatacacgtcattgcaagtgtattcaaacaatggcttcgagatttgcccaatcctctcatgacctttgaactctatgaggaatttcttcgagctatgggccttcaggagaggaaggagacaatccgtggtgtatactctgtgattgatcaactctnccgaactcatctcaatacactggaacgcctcatctttcatctagtcaggattgctctgcaggaagacactaatcgaatgtctgctaatgctttggccattgtgtttgcgccctgcattctccgctgcctgcaccactgcccactacaaagtgtcaggacatcagtaagactaccacttgtgtggaactgattgtgtggacaaatgaataatncangntcgctcaaagattcagtaccttggaattgctgagaataagcaaaancncgttg

SEQ ID NO: 97 - DNA, 761 bp, Homo sapiens
  misc_feature (1)..(1): n is a, c, g, or t
  misc_feature (46)..(46): n is a, c, g, or t
  misc_feature (62)..(62): n is a, c, g, or t
  misc_feature (65)..(65): n is a, c, g, or t
  misc_feature (79)..(80): n is a, c, g, or t
  misc_feature (86)..(86): n is a, c, g, or t
  misc_feature (143)..(143): n is a, c, g, or t
  misc_feature (147)..(147): n is a, c, g, or t
  misc_feature (160)..(160): n is a, c, g, or t
  misc_feature (184)..(184): n is a, c, g, or t
  misc_feature (194)..(194): n is a, c, g, or t
  misc_feature (327)..(327): n is a, c, g, or t
  misc_feature (355)..(355): n is a, c, g, or t
  misc_feature (375)..(375): n is a, c, g, or t
  misc_feature (480)..(480): n is a, c, g, or t
  misc_feature (490)..(490): n is a, c, g, or t
  misc_feature (508)..(508): n is a, c, g, or t
  misc_feature (537)..(537): n is a, c, g, or t
  misc_feature (571)..(571): n is a, c, g, or t
  misc_feature (575)..(575): n is a, c, g, or t
  misc_feature (586)..(586): n is a, c, g, or t
  misc_feature (594)..(594): n is a, c, g, or t
  misc_feature (598)..(598): n is a, c, g, or t
  misc_feature (613)..(613): n is a, c, g, or t
  misc_feature (633)..(633): n is a, c, g, or t
  misc_feature (635)..(635): n is a, c, g, or t
  misc_feature (639)..(639): n is a, c, g, or t
  misc_feature (656)..(656): n is a, c, g, or t
  misc_feature (676)..(676): n is a, c, g, or t
  misc_feature (689)..(689): n is a, c, g, or t
  misc_feature (715)..(715): n is a, c, g, or t
  misc_feature (720)..(720): n is a, c, g, or t
  misc_feature (727)..(727): n is a, c, g, or t
  misc_feature (733)..(734): n is a, c, g, or t
  misc_feature (760)..(760): n is a, c, g, or t; nbla-03223-r1
ntaacatggagtgttttttcagaaatttttttaatagagggattanttttttttgtttgtanggnagtttttggaaaannattatnttctaccctagctcctaactatcccaaaataaacccaaaggcttttgctttcacggntaanaaagatttatacnttttcttcaaatgtcagaaatganagggtccctnaggacagcaatatcccccctagttcaacacccacctttgggaagggaaaagagggtgggggagaggcaactacaactgacccaaatccccaggccctaggtggctttgtatagtaaaaatctcaattcaaatncaacagccaaggcacagctggcaccatncccagcaggctttctgcttntgcaggaggcccaggaattcagcacatacagtcttagccatatgcttagaaaagaggcaggaccacaattaggattgctattgtggaccaagtgatgaaacccanccccaaaggngagatttggttaccactntgtaccaccgagggaacacatttgccggntcggccataaattcattattttcaaaaaggctanctgntggttggaagngcaatctnggtncacaagtttttttgnggccaacatgactgtccctntngggnctctttgggtttctgangggagtttttacaatctttnaattttgggttgnccttttccgggttaaaggtcctttgntgatnaactgangcttgnntttcaagaatttggctgggccaaagnc

SEQ ID NO: 98 - DNA, 763 bp, Homo sapiens
  misc_feature (65)..(65): n is a, c, g, or t
  misc_feature (78)..(78): n is a, c, g, or t
  misc_feature (81)..(81): n is a, c, g, or t
  misc_feature (537)..(537): n is a, c, g, or t
  misc_feature (607)..(607): n is a, c, g, or t
  misc_feature (639)..(639): n is a, c, g, or t
  misc_feature (702)..(702): n is a, c, g, or t
  misc_feature (725)..(725): n is a, c, g, or t
  misc_feature (741)..(741): n is a, c, g, or t
  misc_feature (747)..(747): n is a, c, g, or t
  nbla-03224-f
ctcctccatcattgaaaagtggtcgatggttcgattgcaggcaccttttaaacccgattcagggntgctggatggatnggngacgactgatgctgctctaatgtatgatgctgtgcatgtggtgtctgtggccgttcaacagtttccccagatgacagtcagttccttgcagtgtaatcgacataaaccctggcgcttcgggacccgctttatgagtctaattaaagaggcacattgggaaggcctcacaggcagaataactttcaacaaaaccaatggcttgagaacagattttgatttggatgtgatcagtctgaaggaagaaggtctagaaaagattggaacgtgggatccagccagtggcctgaatatgacagaaagtcaaaagggaaagccagcgaacatcacagattccttatccaatcgttctttgattgttaccaccattttggaagagccttatgtcctttttaagaaatctgacaaacctctctatggtaatgatcgatttgaaggctattgcattgatctcctcanagagttatctacaatccttggctttacatatgaaattagacttgtggaagatgggaaatatggagcccangatgatgccaatggacaatggaatggaatggntcgtgaactaattgatcataaactgccttgcaattgcttcactggctattacctatgttcganagaaggcatcgacttttccaagnccttatgacacttggnataagnattttgacccgaagcc

SEQ ID NO: 99 - DNA, 767 bp, Homo sapiens
  misc_feature (46)..(46): n is a, c, g, or t
  misc_feature (65)..(65): n is a, c, g, or t
  misc_feature (78)..(79): n is a, c, g, or t
  misc_feature (98)..(98): n is a, c, g, or t
  misc_feature (359)..(359): n is a, c, g, or t
  misc_feature (372)..(372): n is a, c, g, or t
  misc_feature (473)..(473): n is a, c, g, or t
  misc_feature (486)..(486): n is a, c, g, or t
  misc_feature (494)..(494): n is a, c, g, or t
  misc_feature (527)..(527): n is a, c, g, or t
  misc_feature (622)..(622): n is a, c, g, or t
  misc_feature (624)..(624): n is a, c, g, or t
  misc_feature (629)..(629): n is a, c, g, or t
  misc_feature (638)..(638): n is a, c, g, or t
  misc_feature (640)..(641): n is a, c, g, or t
  misc_feature (701)..(701): n is a, c, g, or t
  misc_feature (711)..(711): n is a, c, g, or t
  misc_feature (736)..(736): n is a, c, g, or t
  misc_feature (744)..(745): n is a, c, g, or t
  misc_feature (747)..(747): n is a, c, g, or t
  misc_feature (762)..(762): n is a, c, g, or t
  nbla-03224-r1
caaacatgagtacataacaagtactggttttttataaaagaggaanttgtatttgccttgggggntaagacttagctnngaatcaaccattaaattgntaatattttcccagtttgctcagttttgatggatttattcataagatatcctatcaatcataatctcaggacacagctcagagcaagtgaggaggggatgggcctgtcaaatattcgtccctcttcctttatccattgaatcacttatgcattgacaatttcttgagcacctatcacaggccattgattgcattatgtgctcaggggaaacagatgactagaacattcaggtcctcaacatatcctgttataaaagttaanatctgaacaaatnactaattagaataaagtggatttaagtaatatgcttattttcacagacttcaaatttatgactgatgctttggtactaacaagtaatggcaaatatactgngaaatcagaagtntaaaatgncaatacattattggggcattcaaaaacaattgngtgtgataacatgcaaggagaatatgttttcactgagctatatcttacataaattattaccaaaataaaccttacttttttattaagactaatgngnaacantttacagangnnttttttaacccaaggacaaactgcaaaatgaggggagaaccatgaccgataaagctgaanatagaccctntgacttggtataaaaaaggcttatnagaagtgnnanatttgggtttcttgnaaaaa

SEQ ID NO: 100 - DNA, 804 bp, Homo sapiens
  misc_feature (2)..(2): n is a, c, g, or t
  misc_feature (396)..(396): n is a, c, g, or t
  misc_feature (526)..(526): n is a, c, g, or t
  misc_feature (621)..(621): n is a, c, g, or t
  misc_feature (683)..(683): n is a, c, g, or t
  misc_feature (703)..(703): n is a, c, g, or t
  misc_feature (707)..(707): n is a, c, g, or t
  misc_feature (711)..(711): n is a, c, g, or t
  misc_feature (730)..(730): n is a, c, g, or t
  misc_feature (750)..(750): n is a, c, g, or t
  misc_feature (757)..(757): n is a, c, g, or t
  misc_feature (769)..(770): n is a, c, g, or t
  misc_feature (773)..(774): n is a, c, g, or t
  misc_feature (782)..(782): n is a, c, g, or t
  misc_feature (790)..(790): n is a, c, g, or t
  nbla-03298-r1
tntactgtatgctgtatgttacagtctactatagtcattgctctatttttagaatatgtcagtacacactggctgaattccacattttctcattagtaactttttcagtggtctttattacactacattttatttttgaaaagaaaaactcaccttttactagggtaggacagaggaataggttgaatatttacagatttcataccataaacatgatctggtctattttggccttggaaattaagataattttaattaagttttgcctttggctagcatcagtgacatagaaatgtccttttctgtagttttctttggaaatgcaacaaactaaaaaatgcagaagtactatactttgtatgttaaggcattaccttaagtgttggttcactttgntactataaaaaaggttgatatttttggctgcccttaagtgaatttaataacaactactaataaaaatatttgcaaaagtattttacatatatctaatcataaatatccacaaaattccggtgagaaaggnaattcatacccattttaaggaagataaattacttattcacgtaacatagaaaaaatgaaagtctagtttgactgacttcaaagactatatttttnccctagaatattaactacctttaatttctccaactaagaactggggacattttttaaatatntattggtatggaatctattncccnaagnccaaaggggaactgaaccnaggaaaagatttgaaacttnattccanatactaactcannggnncctgactnaaggaatntttccggcctctct

SEQ ID NO: 101 - DNA, 730 bp, Homo sapiens
  misc_feature (2)..(2): n is a, c, g, or t
  misc_feature (5)..(6): n is a, c, g, or t
  misc_feature (8)..(8): n is a, c, g, or t
  misc_feature (13)..(13): n is a, c, g, or t
  misc_feature (21)..(21): n is a, c, g, or t
  misc_feature (23)..(23): n is a, c, g, or t
  misc_feature (27)..(27): n is a, c, g, or t
  misc_feature (39)..(39): n is a, c, g, or t
  misc_feature (47)..(47): n is a, c, g, or t
  misc_feature (104)..(104): n is a, c, g, or t
  misc_feature (135)..(135): n is a, c, g, or t
  misc_feature (613)..(613): n is a, c, g, or t
  misc_feature (623)..(623): n is a, c, g, or t
  misc_feature (651)..(651): n is a, c, g, or t
  misc_feature (659)..(659): n is a, c, g, or t
  misc_feature (674)..(674): n is a, c, g, or t
  misc_feature (701)..(701): n is a, c, g, or t
  misc_feature (722)..(722): n is a, c, g, or t
  misc_feature (730)..(730): n is a, c, g, or t
  nbla-03401-f
gnagnncngggtngttgctantnatcntttgaactgccngcctactntacatttgtgtttcaggtgtagagaggagagagagtgaacagggagcggggcttttntctgttggtctccctggactgaagagagggngaatagaagcccaagactaagattctcaaaatggtttattacccagaactctttgtctgggtcagtcaagaaccatttccaaacaaggacatggagggaaggcttcctaagggaagacttcctgtcccaaaggaagtgaaccgcaagaagaacgatgagacaaacgctgcctccctgactccactgggcagcagtgaactccgctccccaagaatcagttacctccactttttttaatcgtaacacctccatttgtattacatatggtgtatgggtattgatgaggtcatggtatcatatatgggatttttttctgtgtaaatcatcaagtataagaagaaactatgggactctgagccttgctttagagaatttacagtggacaaataggtgtcatcaaaccagtttttaatcattctgactcaagtgaaaacgctcagaatttcacactgtgaatccacgtttacaacccttacangtgggccttnaagcctggttcgctacaacaatggcttncacaactnaaactccaccggctnacacaacccggccactcctggcttttnacttacacagcttccgactgnttcttgcn

SEQ ID NO: 102 - DNA, 736 bp, Homo sapiens
  misc_feature (91)..(91): n is a, c, g, or t
  misc_feature (93)..(93): n is a, c, g, or t
  misc_feature (108)..(108): n is a, c, g, or t
  misc_feature (559)..(559): n is a, c, g, or t
  misc_feature (651)..(651): n is a, c, g, or t
  misc_feature (666)..(666): n is a, c, g, or t
  misc_feature (681)..(681): n is a, c, g, or t
  misc_feature (695)..(695): n is a, c, g, or t
  misc_feature (702)..(703): n is a, c, g, or t
  misc_feature (708)..(708): n is a, c, g, or t
  misc_feature (710)..(710): n is a, c, g, or t
  misc_feature (712)..(713): n is a, c, g, or t
  misc_feature (716)..(716): n is a, c, g, or t
  misc_feature (722)..(722): n is a, c, g, or t
  misc_feature (735)..(736): n is a, c, g, or t
  nbla-03421-f
cactgttggcctactggataatgaagataataatatctttattctttatcccccttcaaagaaattacctttgtgtcaaatgccgctttgngnggagcccttaaaatnccacctcctcatgtgtaaattgacacaatcactaatctggtaatttaaacaattgagatagcaaaagtgtttaacagactaggataatttttttttcatatttgccaaaatttttgtaaaccctgtcttgtcaaataagtgtataatattgtattattaatttatttttactttctataccatttcaaaacacattacactaagggggaaccaagactagtttcttcagggcagtggacgtagtagtttgtaaaaacgttttctatgacgcataagctagcatgcctatgatttatttccttcatgaatttgtcactggatcagcagctgtggaaataaagcttgtgagccctctgctggccacagtgaggaaagtagcacacataggatacagttgtatgtagtcattggcaacaattgcatacaattttactaccaagagaaggtctcncatggaaagtccaaatgacttccttgatggatgttaacaagctgactggtgtgagacttgaggttcatctagtccttcaaaactatattggntgcctagattctctntggaaactgactttncaaataaatagcanattgtanngctgngncnnttnggacantactgcttttatnn

SEQ ID NO: 103 - DNA, 752 bp, Homo sapiens
  misc_feature (17)..(17): n is a, c, g, or t
  misc_feature (23)..(23): n is a, c, g, or t
  misc_feature (30)..(31): n is a, c, g, or t
  misc_feature (66)..(66): n is a, c, g, or t
  misc_feature (87)..(88): n is a, c, g, or t
  misc_feature (95)..(95): n is a, c, g, or t
  misc_feature (101)..(101): n is a, c, g, or t
  misc_feature (110)..(110): n is a, c, g, or t
  misc_feature (114)..(115): n is a, c, g, or t
  misc_feature (117)..(117): n is a, c, g, or t
  misc_feature (123)..(124): n is a, c, g, or t
  misc_feature (130)..(131): n is a, c, g, or t
  misc_feature (135)..(135): n is a, c, g, or t
  misc_feature (138)..(138): n is a, c, g, or t
  misc_feature (147)..(149): n is a, c, g, or t
  misc_feature (152)..(152): n is a, c, g, or t
  misc_feature (164)..(164): n is a, c, g, or t
  misc_feature (175)..(175): n is a, c, g, or t
  misc_feature (182)..(183): n is a, c, g, or t
  misc_feature (198)..(198): n is a, c, g, or t
  misc_feature (206)..(206): n is a, c, g, or t
  misc_feature (208)..(208): n is a, c, g, or t
  misc_feature (210)..(211): n is a, c, g, or t
  misc_feature (216)..(218): n is a, c, g, or t
  misc_feature (223)..(223): n is a, c, g, or t
  misc_feature (225)..(225): n is a, c, g, or t
  misc_feature (234)..(234): n is a, c, g, or t
  misc_feature (236)..(237): n is a, c, g, or t
  misc_feature (239)..(240): n is a, c, g, or t
  misc_feature (242)..(242): n is a, c, g, or t
  misc_feature (253)..(254): n is a, c, g, or t
  misc_feature (266)..(267): n is a, c, g, or t
  misc_feature (281)..(281): n is a, c, g, or t
  misc_feature (283)..(283): n is a, c, g, or t
  misc_feature (292)..(292): n is a, c, g, or t
  misc_feature (298)..(298): n is a, c, g, or t
  misc_feature (301)..(301): n is a, c, g, or t
  misc_feature (304)..(305): n is a, c, g, or t
  misc_feature (310)..(312): n is a, c, g, or t
  misc_feature (317)..(317): n is a, c, g, or t
  misc_feature (323)..(323): n is a, c, g, or t
  misc_feature (328)..(328): n is a, c, g, or t
  misc_feature (333)..(334): n is a, c, g, or t
  misc_feature (343)..(344): n is a, c, g, or t
  misc_feature (353)..(353): n is a, c, g, or t
  misc_feature (357)..(357): n is a, c, g, or t
  misc_feature (361)..(361): n is a, c, g, or t
  misc_feature (363)..(363): n is a, c, g, or t
  misc_feature (367)..(367): n is a, c, g, or t
  misc_feature (378)..(378): n is a, c, g, or t
  misc_feature (381)..(381): n is a, c, g, or t
  misc_feature (384)..(384): n is a, c, g, or t
  misc_feature (386)..(386): n is a, c, g, or t
  misc_feature (388)..(388): n is a, c, g, or t
  misc_feature (393)..(393): n is a, c, g, or t
  misc_feature (402)..(402): n is a, c, g, or t
  misc_feature (405)..(405): n is a, c, g, or t
  misc_feature (407)..(407): n is a, c, g, or t
  misc_feature (417)..(417): n is a, c, g, or t
  misc_feature (425)..(425): n is a, c, g, or t
  misc_feature (432)..(432): n is a, c, g, or t
  misc_feature (436)..(436): n is a, c, g, or t
  misc_feature (449)..(449): n is a, c, g, or t
  misc_feature (452)..(452): n is a, c, g, or t
  misc_feature (462)..(462): n is a, c, g, or t
  misc_feature (465)..(465): n is a, c, g, or t
  misc_feature (481)..(481): n is a, c, g, or t
  misc_feature (497)..(499): n is a, c, g, or t
  misc_feature (515)..(515): n is a, c, g, or t
  misc_feature (527)..(527): n is a, c, g, or t
  misc_feature (532)..(533): n is a, c, g, or t
  misc_feature (542)..(542): n is a, c, g, or t
  misc_feature (546)..(547): n is a, c, g, or t
  misc_feature (561)..(561): n is a, c, g, or t
  misc_feature (566)..(566): n is a, c, g, or t
  misc_feature (568)..(568): n is a, c, g, or t
  misc_feature (580)..(580): n is a, c, g, or t
  misc_feature (596)..(596): n is a, c, g, or t
  misc_feature (600)..(601): n is a, c, g, or t
  misc_feature (603)..(603): n is a, c, g, or t
  misc_feature (609)..(609): n is a, c, g, or t
  misc_feature (630)..(631): n is a, c, g, or t
  misc_feature (645)..(645): n is a, c, g, or t
  misc_feature (654)..(654): n is a, c, g, or t
  misc_feature (657)..(657): n is a, c, g, or t
  misc_feature (663)..(664): n is a, c, g, or t
  misc_feature (669)..(669): n is a, c, g, or t
  misc_feature (680)..(680): n is a, c, g, or t
  misc_feature (683)..(683): n is a, c, g, or t
  misc_feature (692)..(692): n is a, c, g, or t
  misc_feature (703)..(703): n is a, c, g, or t
  misc_feature (714)..(714): n is a, c, g, or t
  misc_feature (716)..(716): n is a, c, g, or t
  misc_feature (720)..(720): n is a, c, g, or t
  misc_feature (724)..(724): n is a, c, g, or t
  misc_feature (729)..(730): n is a, c, g, or t
  misc_feature (733)..(736): n is a, c, g, or t
  misc_feature (746)..(746): n is a, c, g, or t
  misc_feature (751)..(751): n is a, c, g, or t
  nbla-03421-r1
gtcccttttcctttttntttttntttcctnnttttttttttttttttttttttttttttttttatnccctttttaaaatttaatttnnaaaaacncctttngggtaaccnttcnnanttaaannggaaanngccnaantttttaggnnnccntccctggaatgntttcatttttncaagggnncccaaaaaagggccntttaaaancncnnttccnnnttttnancccggggancnncnntnttttcccatgnnacttttaacttnntggaaaatcccccnanaaaaaaagntcaaanccnatnnccttnnnttaancccctnggttnggctnngtttttttnnaaaattccnaaangggngnctanttttttcccanaanttncncntttcntttaggccnccngnggggaatttnaatttttnaggtccnaaanggttttaatttcncancttttccaanagngccctttgggggattnggcccctttttttttnnncaaaaattttttaatngaaggaaggttnctttnnaaaacaccncccnnggtttttccttaanacttnancatttttggatnaaactggcaaaatttntaanntnccaaangggcttaagggcccccaaggnnggaaccttcttttnggggttttnccnctttannaccgntccctgttttnaancccttactnccctttttttnaaggggttaanancccncccntcccnnggnnnnccccccaccnccaanc

SEQ ID NO: 104 - DNA, 732 bp, Homo sapiens
  misc_feature (2)..(2): n is a, c, g, or t
  misc_feature (4)..(4): n is a, c, g, or t
  misc_feature (15)..(15): n is a, c, g, or t
  misc_feature (73)..(73): n is a, c, g, or t
  misc_feature (87)..(87): n is a, c, g, or t
  misc_feature (90)..(90): n is a, c, g, or t
  misc_feature (104)..(105): n is a, c, g, or t
  misc_feature (566)..(566): n is a, c, g, or t
  misc_feature (642)..(642): n is a, c, g, or t
  misc_feature (650)..(650): n is a, c, g, or t
  misc_feature (706)..(706): n is a, c, g, or t
  misc_feature (711)..(711): n is a, c, g, or t
  misc_feature (732)..(732): n is a, c, g, or t
  nbla-03439-f
gncngcctactgttnaaccaaggtctgtggataacagaccacaagcaccactggtttctgcgtctgctgttantgaagaagtcagcnggnttaaatctacaggnnaatttccagaacaaaaattgtttgctgccctgttgattaaatgtgttgtgcagctggaactcatccagactatcgacaacattgtcttcttcccagccacaagtaagaaagaagatgcagaagacttagctgcagcacagagagatgcggtggactttgatgttcgcgttgatactcaagaccaaggaatgtaccgctttttaacatcacaacaactttttaagctactggactgcttattagagtcacatagatttgcaaaagcgtttaattccaacaacgaacagaggactgccctgtggaaagcaggattcaaaggcaaatccaagcccaaccttctgaagcaggagaccagcagcctgcctgtgggctgcgcattctcttccggatgtacatggatgagagccgcgttagtgcctgggaggaggtccagcagaagcttttgaatgtctgcagtgaancactaagttacttcctactctacatcaagaaagtcatcgagaaacctggctaacttactgcttttggttctaactnaagttctnaagataagtgataatagggttaaagctcatgcatcattctactacccttcttatgngaaantatgcaatttgacttgattcn

SEQ ID NO: 105 - DNA, 713 bp, Homo sapiens
  misc_feature (2)..(2): n is a, c, g, or t
  misc_feature (82)..(82): n is a, c, g, or t
  misc_feature (85)..(85): n is a, c, g, or t
  misc_feature (97)..(97): n is a, c, g, or t
  misc_feature (99)..(99): n is a, c, g, or t
  misc_feature (450)..(450): n is a, c, g, or t
  misc_feature (472)..(472): n is a, c, g, or t
  misc_feature (493)..(493): n is a, c, g, or t
  misc_feature (501)..(501): n is a, c, g, or t
  misc_feature (503)..(503): n is a, c, g, or t
  misc_feature (520)..(520): n is a, c, g, or t
  misc_feature (530)..(530): n is a, c, g, or t
  misc_feature (540)..(540): n is a, c, g, or t
  misc_feature (545)..(545): n is a, c, g, or t
  misc_feature (548)..(548): n is a, c, g, or t
  misc_feature (550)..(550): n is a, c, g, or t
  misc_feature (560)..(560): n is a, c, g, or t
  misc_feature (577)..(577): n is a, c, g, or t
  misc_feature (585)..(585): n is a, c, g, or t
  misc_feature (596)..(596): n is a, c, g, or t
  misc_feature (600)..(600): n is a, c, g, or t
  misc_feature (611)..(611): n is a, c, g, or t
  misc_feature (616)..(616): n is a, c, g, or t
  misc_feature (625)..(627): n is a, c, g, or t
  misc_feature (629)..(629): n is a, c, g, or t
  misc_feature (632)..(632): n is a, c, g, or t
  misc_feature (651)..(651): n is a, c, g, or t
  misc_feature (655)..(655): n is a, c, g, or t
  misc_feature (661)..(661): n is a, c, g, or t
  misc_feature (669)..(669): n is a, c, g, or t
  misc_feature (677)..(677): n is a, c, g, or t
  misc_feature (680)..(680): n is a, c, g, or t
  misc_feature (682)..(682): n is a, c, g, or t
  misc_feature (685)..(686): n is a, c, g, or t
  misc_feature (688)..(688): n is a, c, g, or t
  misc_feature (690)..(690): n is a, c, g, or t
  misc_feature (692)..(692): n is a, c, g, or t
  misc_feature (694)..(694): n is a, c, g, or t
  misc_feature (696)..(696): n is a, c, g, or t
  misc_feature (698)..(699): n is a, c, g, or t
  misc_feature (703)..(703): n is a, c, g, or t
  misc_feature (712)..(712): n is a, c, g, or t
  nbla-03439-r1
anctttattgacctataacctgattagaatatgccagatgggaatcaatattttgcagaaagttgtacagaattttttacanggnaaactttacatngngtaccatatacattttgtccatctgaaaaaattttctacatccactgttaatacggaatgcttgacaatcttgtcttttaaccatcagagcacaattcacagtatgaatacatttccagtaaatctaacctccgcaaaccatgccagatttgttattttaatatattcaacgttaaattctgtacatagagtaaaatctacatcaggccccaccacccaaaagaaaagaaaatgacagcaatctggattcattttgcagtgattcaagttttggtccataaaggaccattctattttaatggctcatctttaaaagtcctaagagaaatatgtgacaggtagttactgtcngtagggatattttctacctttntttccctattggtgaaatgcngccacaananctttgggcatgttcaanctcaaaattnccaccttccnaaaanggngnaacttaaaancctctttaataaaaaanaaagtttnccccatgtttntgcntttttcaaaanatttngggttttcnnngnttntaaaatttaaaaaacacgncggngaaaantttatggngtaaaaanttntnttnnancncntntntnnaganttttataana

SEQ ID NO: 106 - DNA, 2231 bp, Homo sapiens
  nbla-03461
cactgttggcctactgggtaactgtcagtcaaattatcccatttcctaggtctgtctcttttttctttgcagtttaattattagtaaataagaaattttaagtctcaaaattttggtcagagataaactcagacactgcctcgatatcacgaagttctcatttataccaactcttatcttcacgccaccgtgaattctcatcggcataaggaggaaaagagatggcaccaaaggggaaaaaaatctggtggtgtaatttggcatcttcattaagcaagccatgagcagcttgtgaaatgcttcatttatggggccgccagctgggagagagaggcgttctcacaatgccttgaaaatgggaactttgcatcctttaaatttttccaaactgacttagtttgtttaccttgaatttctgggatggggcaaatgtgaccttcatgctatagggcccacgtttccagatttggtatggaaagaaggaagaaagtctgaccctcttgtttttaagataggcaaaaggaagatgagatagtccatggttcaccacccaaggtccttcctgggcactggctgggctgacgctgggcctggttcccagctatgcctacctttctcttgccataccacaccgttgctttatgagcattcttttgttaaggccaagatcaagataacttttttccttgaataataggacagtcaccttccccagtggactttaagtggcatctgaatgtagaaaggaaaacaaccatgacctgtatttttagagtagaaataaaattcctcattccacgtatataatcgtggataagcacaaatacctagctatagaaatgtttgtaaaagtggaaaattggcagcaacccaaaagcccaacagcagacaattagttaaatcagttatggtctataatcgcagtaggatttatgttcccctttaaaattctggaaagaaaaatatagacttagaaagggcatgtgatgggggaaggggaaaaacaggtctgtaatgtaataacttttgcaatatttttccattttatcagaagagtatcagctattatctttgagtaataaggttatattttctaaatttgttttaaagttttgaatgaaatgtctgttacttttatgagattaatttttatataccgatatatgaaagaaaaatattaacctttagatccattaaggtcctccctggggaatggcaaatacatagcatatgtctctcctcaccttccttctccgtctatagcaaaaactttctatcaatctgtgatcattccctctgtgcctggtagaagacctcagaatgctctcaaccactatcaatccatgttccttggtatatacatgggaactcaaatggcattgtcctaagtctaagtcatggaaaagagagtgctctaggtgtgaagatgccccaattaaaacaagttcagcgctaattcaaagtaaagcatttgggccttcctgggaagctgtagtagcatgcagaaataccaaggcagagttatgatcgtgctgattttttcctatcagtgggagggtgcagtctgcatatattttacccctgctctcactgcagtgtggggtggatcgataggtggatgtgtaatattaactggcacattgacaccctaatttttgcaaatggtaaagccattccacatatgcatttgttcaagaagctaatgtttattgaaaacctattgtgttctaagccatgaaccatccccaggtaagtgacctcagctctgccattacgagtcctctggggctggccagggaaggtaagagcccaccctcctcatctgtggagttgctatggagatctctgcacctctagacagatactaaggactcaatgcaactggcagaacatttttttgatagcacaagatgaaaaacaatttgcaaggtatttctgaaaagttaatgaaaattgtaggatagttgaaagcaaaagtgaacattatgaggcatatgatactgttaaaatcatcatacactgctgtaaagcagtttcaatatctgtatgtctgccccaggaataatcaaccaggtattacctagaatagtgtttttcaacttctgcaactgtaatctagagcaagagatgacaagttttgcattatggcccagtacgcacatgcctatgcctagatacagctgaaacaaacaaaaaaaaaaaaaaaaaggccacatgtgctcgagctgcag

SEQ ID NO: 107 - DNA, 737 bp, Homo sapiens
  misc_feature (4)..(4): n is a, c, g, or t
  misc_feature (56)..(56): n is a, c, g, or t
  misc_feature (59)..(60): n is a, c, g, or t
  misc_feature (91)..(91): n is a, c, g, or t
  misc_feature (521)..(521): n is a, c, g, or t
  misc_feature (524)..(524): n is a, c, g, or t
  misc_feature (614)..(614): n is a, c, g, or t
  misc_feature (626)..(626): n is a, c, g, or t
  misc_feature (684)..(684): n is a, c, g, or t
  misc_feature (714)..(714): n is a, c, g, or t
  nbla-03477-f
ggcncgcccgcccaccgctctccacgtgctcgctggagggcggtgcgaggggccgnttnnacaagatgttcttgctgcctcttccgggggnggtgcgagtagtcgtccgacgtctggccgtgagacgtttcgggagccggagtctctccaccgcagacatgacgaagggccttgttttaggaatctattccaaagaaaaagaagatgatgtgccacagttcacaagtgcaggagagaattttgataaattgttagctggaaagctgagagagactttgaacatatctggaccacctctgaaggcagggaagactcgaaccttttatggtctgcatcaggacttccccagcgtggtgctagttggcctcggcaaaaaggcagctggaatcgacgaacaggaaaactggcatgaaggcaaagaaaacatcagagcagctgttgcagcggggtgcaggcagattcaagacctggagctctcgtctgtggaggtggatccctgtggagacgctcaagctgctgcnganggaacggtgcttggtctctatgaatacgatgacctaaagcaaaaaaagaagatggcttgtgtcgcaaaactctatggaagtggggatcangaagcctggcanaaaaggagtcctgtttgcttctgggcaaaacttggcacgccaattgatggagacccancccatgagattacgccaaccagatttgccnaaattattgggaaaaatttaaaa

SEQ ID NO: 108 - DNA, 750 bp, Homo sapiens
  misc_feature (17)..(17): n is a, c, g, or t
  misc_feature (47)..(48): n is a, c, g, or t
  misc_feature (53)..(54): n is a, c, g, or t
  misc_feature (71)..(71): n is a, c, g, or t
  misc_feature (75)..(75): n is a, c, g, or t
  misc_feature (85)..(85): n is a, c, g, or t
  misc_feature (109)..(109): n is a, c, g, or t
  misc_feature (130)..(130): n is a, c, g, or t
  misc_feature (132)..(132): n is a, c, g, or t
  misc_feature (260)..(260): n is a, c, g, or t
  misc_feature (301)..(301): n is a, c, g, or t
  misc_feature (508)..(508): n is a, c, g, or t
  misc_feature (538)..(538): n is a, c, g, or t
  misc_feature (566)..(566): n is a, c, g, or t
  misc_feature (570)..(570): n is a, c, g, or t
  misc_feature (584)..(584): n is a, c, g, or t
  misc_feature (595)..(595): n is a, c, g, or t
  misc_feature (597)..(597): n is a, c, g, or t
  misc_feature (599)..(599): n is a, c, g, or t
  misc_feature (617)..(617): n is a, c, g, or t
  misc_feature (619)..(619): n is a, c, g, or t
  misc_feature (621)..(621): n is a, c, g, or t
  misc_feature (624)..(626): n is a, c, g, or t
  misc_feature (629)..(629): n is a, c, g, or t
  misc_feature (640)..(640): n is a, c, g, or t
  misc_feature (645)..(645): n is a, c, g, or t
  misc_feature (660)..(661): n is a, c, g, or t
  misc_feature (666)..(667): n is a, c, g, or t
  misc_feature (672)..(672): n is a, c, g, or t
  misc_feature (679)..(679): n is a, c, g, or t
  misc_feature (683)..(683): n is a, c, g, or t
  misc_feature (685)..(685): n is a, c, g, or t
  misc_feature (689)..(689): n is a, c, g, or t
  misc_feature (691)..(691): n is a, c, g, or t
  misc_feature (693)..(693): n is a, c, g, or t
  misc_feature (696)..(696): n is a, c, g, or t
  misc_feature (698)..(698): n is a, c, g, or t
  misc_feature (717)..(718): n is a, c, g, or t
  misc_feature (728)..(728): n is a, c, g, or t
  misc_feature (730)..(730): n is a, c, g, or t
  misc_feature (733)..(733): n is a, c, g, or t
  misc_feature (737)..(737): n is a, c, g, or t
  misc_feature (739)..(739): n is a, c, g, or t
  nbla-03477-r1
gaccccatcaagttttnattaattgtccctgacaagtgcatagtaannttcannttgctcatgttcctagntttncaaatctganttacaattttgcttcggggggaanaacatatactctgaaaagtgncnaggaagttctaaaaattttaatcatttatagagtatcttaaaaatccttatcaagtaagatattaactttacctttataaatctttgtgtgaaatgaaaaaaaaatcaaggcatacaaatttcattgngttctacatttttaaataccatcctttgtctccgttaaaanattttcatccatttattcaaaaaccttttaagttcaactgtccaatttaagacagagtgaagacatttttgagtatctgaactaagcattgtcttgactgaaacgaagtaagaactcaatgagagtccttgtgggcctccagtcatgcctttccgtagatagggaacttcatctttgttggcatcacgcctgctatgtctaaatgtncccacttaggatgagttccaattctttcangaatgctgcacctgacatgctcctgcanatcnggattttccaatgntgttaacatcncnangcttgtaatttacaaccngncnttnnnaantgtccaaaaanaggcntccttcaaacaccgnnccccnntttcnaatgctncccntnaaantntnttncntaacccctgatttaatttnnaaaaaccccntngcncctntncccaagttcct

SEQ ID NO: 109 - DNA, 2342 bp, Homo sapiens
  nbla-03526
ttctaggcctgtacggaagtgttacttctgctctaaaagctgcggaattcctcgagcactgttggcctactggcagattgttttatatttcaatgtattatgtggagagtgacttttcattaataaactacaaagaaatgggttataaggaatattcatgaacatgctctatagaaatataataaaaattcattgatgcaaagtccttttttaaaaataattttcaatctttttgataagctggacggaagcatctgtcttttactatgaagaaaacatttttgaagtgaactgacaacataaggcaaatactgggtaaaaatttaagcatctccaaaatcattttattaacccatttgcatgcaaatactagggaatggttcttcaatatgtagctagttcttgtggtggttaatagttcttcgtgtatttgaaagtaacaaaactgcatttgtgttgaactcttaagaccaattaatcaggtcaaattgctcttaagaccaataaattaggtcagttgctcctaacaaaggcaaattcatcagatttaatttctacccttttctaatataaatttttagaaattttgtttctcagatgtgaggcaaataggttgatctatttgtttattctttgacagagagactgactagagttagacagctttttaataccccttccagtcaaaaagtaacattgttatattagtatttagtagttttaaagtctgatgacataagaacagtaacaatttgttaatattcaaaagattgaaattgaaaaaaaggggtcctgcattctgctctcctagaatttttttttgtgttgaaatcttcttttccatattgtcattattgcttctttatcccatgacattaattttctggtgaggtgaccctgaatttagtcattttcgtcagtaattttagatttaagtaacttatcatgcttgttttaaagtctctctcagctcacccatgaagaaacaaattttttttcatttttttcttcaaaaatcagcaagtattgctgaatctaacaagtatcagcattcaggtttaaccgtgttatttgattgaaataaatcaaaccatggaaataatgggcactgtgtctgctcaagagtaaaattacccaatgaatgattatgtcaactggatgtcttttatatcaattgatgactttttaaaaaatctgtattttaaataaaatatggagagaacagtattggtccctacaacattccaatagctttgtcatgacagccatgtcatatgaaataacttactctgaatggctaataattcagtggagatgaattctaaagatttttatttgcacttaaaatgttaaagtagtattgttcatttgatcaatgtttgaatactactcagtattgaaaactttaactgcattctgaaaggtcattgcgccgattggcttacctaagatgtcatttagcttccttttctcatgatttacacaaatgttgttaccttaaatgcagaaagatgtgatattctttggaggataaaaaacctaagtgaatgaagctagacacaaaaggctacatattatatgatttcatttatatgaaatatgcagaataggtaaattcatagagataaatcagattcatggttgctgggggaatgggagtgactgcttcatgggtatggggttttcttttggattgatgaaaatattgtagaacaagatagtggggatagttgcacattgtgaatgtgccaaaatgccagtgaattgtatactttaaaatggtgtatttgatgtgtattttattacaattaaaaagaaaaggatttgatatttgcaatcattaccaaagccaaaaactagtgttctcaacgtttgtgaaatgcccaaaccgtggtttagaattaatttatagcattagtaacatgacaaatctattcagcttaaagttctagtaaaatttgtgaatcccatcatagaagtactcctgacagcagcagaaataaagctgtaattcatcaaaatttccttatatttaaaacttctgtgactgagtgattgacttctgtgtcaatgtttattttttatcttttgaaatttattatgattccttgtggcacatcccaatcacgctttttaaagatgtgtttttaaaaccatgctttgaaaaaaatttgtataattttcaaggtttttttttatagttttatactttgtttcttttaaagaacaaatgcaacttgttgtattagagtaagactaaataaattgtactgatgtgtaaaaaaaaaaaaaaaaaaaacaaaggccacatgtgctcgagctgcaggtcgcggccgctagac

SEQ ID NO: 110 - DNA, 739 bp, Homo sapiens
  misc_feature (2)..(2): n is a, c, g, or t
  misc_feature (71)..(72): n is a, c, g, or t
  misc_feature (87)..(87): n is a, c, g, or t
  misc_feature (116)..(116): n is a, c, g, or t
  misc_feature (355)..(355): n is a, c, g, or t
  misc_feature (623)..(623): n is a, c, g, or t
  misc_feature (632)..(632): n is a, c, g, or t
  misc_feature (635)..(635): n is a, c, g, or t
  misc_feature (638)..(638): n is a, c, g, or t
  misc_feature (654)..(654): n is a, c, g, or t
  misc_feature (679)..(679): n is a, c, g, or t
  misc_feature (682)..(682): n is a, c, g, or t
  misc_feature (687)..(687): n is a, c, g, or t
  misc_feature (696)..(696): n is a, c, g, or t
  misc_feature (701)..(701): n is a, c, g, or t
  misc_feature (710)..(710): n is a, c, g, or t
  misc_feature (719)..(719): n is a, c, g, or t
  misc_feature (727)..(727): n is a, c, g, or t
  misc_feature (730)..(730): n is a, c, g, or t
  nbla-03539-f
tnaaacccccctgctgttaagacttgacattcaatattttttgatcacattcttttttatagcttagctannggcaacatttgtggncatataaattgcaaaagaagctttctcgngtacatacatttttaaaagcttgaaattgatgtgaacttttaaaaacacgtaggatctgtattacattctacatctcaaaacaaatttaattaaagtgaatatcattccagtatatacaatatgcctaagacccagaattggcacactgatttactagttgaaaatataacagtattcaccaaacttcaatgtatactttttggagagaatgaaattacagtatttcttaatttactgnaatgtcatctttgtaattatgaattaacaattcaatgagaggagacttggttgattaaattaatgctggtcctacacattatatctaaaggatcttcgtatatgactactatcttcttggattattttaacaggtaaaatatcaaagtggccattaaaaacagagttgacttttcaccattgctggttttctggtgagacatgtggaaaggaaggacaggtggacttttcaactaactagctctctgatttttaataagatcctcaantcttttggnctnagntacctatctgtccaanggtaagcatatgcttaatcactaanacnggtanatcctgccnttaanaaccttatnaaccaaatnctggaccntanggtacaaaa

SEQ ID NO: 111 - DNA, 747 bp, Homo sapiens
  misc_feature (12)..(12): n is a, c, g, or t
  misc_feature (54)..(54): n is a, c, g, or t
  misc_feature (69)..(69): n is a, c, g, or t
  misc_feature (81)..(81): n is a, c, g, or t
  misc_feature (95)..(95): n is a, c, g, or t
  misc_feature (111)..(112): n is a, c, g, or t
  misc_feature (444)..(444): n is a, c, g, or t
  misc_feature (501)..(501): n is a, c, g, or t
  misc_feature (508)..(508): n is a, c, g, or t
  misc_feature (538)..(538): n is a, c, g, or t
  misc_feature (541)..(541): n is a, c, g, or t
  misc_feature (545)..(545): n is a, c, g, or t
  misc_feature (618)..(618): n is a, c, g, or t
  misc_feature (622)..(622): n is a, c, g, or t
  misc_feature (633)..(633): n is a, c, g, or t
  misc_feature (643)..(643): n is a, c, g, or t
  misc_feature (648)..(648): n is a, c, g, or t
  misc_feature (654)..(654): n is a, c, g, or t
  misc_feature (661)..(661): n is a, c, g, or t
  misc_feature (670)..(670): n is a, c, g, or t
  misc_feature (685)..(685): n is a, c, g, or t
  misc_feature (698)..(698): n is a, c, g, or t
  misc_feature (705)..(705): n is a, c, g, or t
  misc_feature (713)..(713): n is a, c, g, or t
  misc_feature (716)..(716): n is a, c, g, or t
  misc_feature (718)..(718): n is a, c, g, or t
  misc_feature (729)..(729): n is a, c, g, or t
  misc_feature (732)..(732): n is a, c, g, or t
  misc_feature (735)..(735): n is a, c, g, or t
  misc_feature (737)..(737): n is a, c, g, or t
  misc_feature (744)..(744): n is a, c, g, or t
  nbla-03539-r1
aaaacctccagnaatattttcacactaccttctattttaaagttcacacttttnattccagagcagggnatggtcaggccngggtgggctccccnccctctccccttggcnntggtaaccactggccccagggactcagcctgctttcctatccatcccctcagtagctgtcaccatgcaggttaccccttctgtttcttctaccactaactccatgtctgactgcaagtgaaaggaacagaagcccaaacctttgggttttaaggagtttattgctaatctgtaaaacagaaagagacaggagataagcatgacaaaatatagggaagaaatgacttttgcctaaacttccaattgtgtacaattgaagcctctgctttatagctcttagcacacctctcaaataagaaggcaagtactgggaaagctctgaacctgtggcanaaccactgatagctgtggagctattcaaggagtctgggaatcaaggggattatcaanacattgntagaataaattaatcttactggatatatancanaaanttttcaagcatatgtaaatgctactaataccaaataattacaccttgttttctttaaaccggaactcttaaanatgnctctacaaaantttttgaatnggaanggctgnatgctcnaaaaacttnaaaacactactgganaaaaaaggtctcnggaaggngatgaaanccntnacattggaacnttnatnanttaaatnggg

SEQ ID NO: 112 - DNA, 725 bp, Homo sapiens
  misc_feature (58)..(59): n is a, c, g, or t
  misc_feature (661)..(661): n is a, c, g, or t
  misc_feature (693)..(693): n is a, c, g, or t
  misc_feature (724)..(725): n is a, c, g, or t
  nbla-03587-f
ttgacagtgccaaagctcggtactggacacaacgagggacctgggtctacgataacgnncttttgctcctcctgaagtgtctttggtccaacgttgttccaggtttgtcaccgtttctctccggccggtcagggcaagagccagagtgtaccatggcttccagtagcactgtgttgatgcggttggtagcctccgcatattctattgctcaaaaggcaggaatgatagtcagacgtgttattgctgaaggagacctgggtattgtggagaagacctgtgcaacagacctgcagaccaaagctgaccgattggcacagatgagcatatgttcttcattggcccggaaattccccaaactcacaattataggggaagagctcgtggtctgggttgatcctctggatggaaccaaggaatataccgaaggtcttcttgacaatgtaacagttcttattggaattgcttatgaaggaaaagccatagcaggagttattaaccagccatattacaactatgaggcaggaccagatgctgtgttggggaggacaatctggggagttttaggtttaagcgcctttgggtttcaactgaaagaagtccctgctgggaaacacattatcacaactactcgatcccatacaacaagttgggtactgactgngttgctgctatgaaccccgatgctgtgctgcnagtaggaagagcaggaaataagaatattcann

SEQ ID NO: 113 - DNA, 734 bp, Homo sapiens
  misc_feature (42)..(42): n is a, c, g, or t
  misc_feature (54)..(54): n is a, c, g, or t
  misc_feature (69)..(69): n is a, c, g, or t
  misc_feature (85)..(85): n is a, c, g, or t
  misc_feature (539)..(539): n is a, c, g, or t
  misc_feature (563)..(563): n is a, c, g, or t
  misc_feature (565)..(565): n is a, c, g, or t
  misc_feature (591)..(591): n is a, c, g, or t
  misc_feature (605)..(605): n is a, c, g, or t
  misc_feature (610)..(610): n is a, c, g, or t
  misc_feature (621)..(621): n is a, c, g, or t
  misc_feature (663)..(663): n is a, c, g, or t
  misc_feature (680)..(680): n is a, c, g, or t
  misc_feature (682)..(682): n is a, c, g, or t
  misc_feature (698)..(698): n is a, c, g, or t
  misc_feature (704)..(704): n is a, c, g, or t
  misc_feature (728)..(728): n is a, c, g, or t
  misc_feature (730)..(730): n is a, c, g, or t
  misc_feature (734)..(734): n is a, c, g, or t
  nbla-03587-r1
gatcaaatctttatttaaaaaaaacttttctcataaatctgnttcataagcatntataataacatcatntatattcttaattggngtagaaacgtttttaaaattactgtgaaaaacaagagtgagattccagaaaaaattgtgccctaaagaaatctggtttaggccaggtgcggtggctcacacctgcaatcccagcactctgggagtccgaggcagacagatcacgatgtcaggagatcaagaccatcctggccaacacggcgaaacaccctctctactaaaaatacaaaaaattagccaggcgtggtggcggtgcctgcagtcccagctactcgggaggctgaggcaggagaatggcatgaacccgggaggcggagcctgcagtgagccgagatcacgccactacactccagcctaggctacagagcgagactccgtctcaggaaaaaaaaagagaaatctggtttagaagataggaatgttcattgaacattgcctgaactgtcaattggaactaaagctttttctcatttctncacctaaatacaggaaaacaaatntnacatattgaggttataagttcttcanacgtcaaaattggnctggntgattaatcangttaaattatttaattctattttctattcctaaatataatancttaatttaaatcctgntnaacaatgaataaaagnggactntaatttacccattaatcttaaaangntttn

SEQ ID NO: 114 - DNA, 805 bp, Homo sapiens
  misc_feature (6)..(8): n is a, c, g, or t
  misc_feature (21)..(21): n is a, c, g, or t
  misc_feature (24)..(24): n is a, c, g, or t
  misc_feature (30)..(31): n is a, c, g, or t
  misc_feature (35)..(35): n is a, c, g, or t
  misc_feature (38)..(40): n is a, c, g, or t
  misc_feature (42)..(42): n is a, c, g, or t
  misc_feature (45)..(45): n is a, c, g, or t
  misc_feature (51)..(51): n is a, c, g, or t
  misc_feature (55)..(55): n is a, c, g, or t
  misc_feature (58)..(58): n is a, c, g, or t
  misc_feature (63)..(63): n is a, c, g, or t
  misc_feature (65)..(65): n is a, c, g, or t
  misc_feature (69)..(69): n is a, c, g, or t
  misc_feature (84)..(86): n is a, c, g, or t
  misc_feature (89)..(89): n is a, c, g, or t
  misc_feature (91)..(91): n is a, c, g, or t
  misc_feature (96)..(97): n is a, c, g, or t
  misc_feature (102)..(103): n is a, c, g, or t
  misc_feature (105)..(105): n is a, c, g, or t
  misc_feature (107)..(107): n is a, c, g, or t
  misc_feature (115)..(115): n is a, c, g, or t
  misc_feature (120)..(120): n is a, c, g, or t
  misc_feature (123)..(123): n is a, c, g, or t
  misc_feature (129)..(129): n is a, c, g, or t
  misc_feature (135)..(135): n is a, c, g, or t
  misc_feature (138)..(138): n is a, c, g, or t
  misc_feature (143)..(144): n is a, c, g, or t
  misc_feature (146)..(147): n is a, c, g, or t
  misc_feature (153)..(153): n is a, c, g, or t
  misc_feature (158)..(158): n is a, c, g, or t
  misc_feature (161)..(161): n is a, c, g, or t
  misc_feature (167)..(167): n is a, c, g, or t
  misc_feature (194)..(194): n is a, c, g, or t
  misc_feature (198)..(198): n is a, c, g, or t
  misc_feature (208)..(208): n is a, c, g, or t
  misc_feature (220)..(220): n is a, c, g, or t
  misc_feature (235)..(235): n is a, c, g, or t
  misc_feature (240)..(240): n is a, c, g, or t
  misc_feature (247)..(249): n is a, c, g, or t
  misc_feature (275)..(275): n is a, c, g, or t
  misc_feature (291)..(291): n is a, c, g, or t
  misc_feature (296)..(296): n is a, c, g, or t
  misc_feature (301)..(301): n is a, c, g, or t
  misc_feature (306)..(306): n is a, c, g, or t
  misc_feature (309)..(310): n is a, c, g, or t
  misc_feature (320)..(320): n is a, c, g, or t
  misc_feature (326)..(327): n is a, c, g, or t
  misc_feature (340)..(340): n is a, c, g, or t
  misc_feature (345)..(345): n is a, c, g, or t
  misc_feature (352)..(354): n is a, c, g, or t
  misc_feature (359)..(359): n is a, c, g, or t
  misc_feature (363)..(366): n is a, c, g, or t
  misc_feature (374)..(374): n is a, c, g, or t
  misc_feature (377)..(377): n is a, c, g, or t
  misc_feature (382)..(382): n is a, c, g, or t
  misc_feature (384)..(384): n is a, c, g, or t
  misc_feature (391)..(392): n is a, c, g, or t
  misc_feature (408)..(408): n is a, c, g, or t
  misc_feature (411)..(411): n is a, c, g, or t
  misc_feature (414)..(414): n is a, c, g, or t
  misc_feature (419)..(420): n is a, c, g, or t
  misc_feature (424)..(425): n is a, c, g, or t
  misc_feature (427)..(427): n is a, c, g, or t
  misc_feature (429)..(429): n is a, c, g, or t
  misc_feature (441)..(443): n is a, c, g, or t
  misc_feature (446)..(446): n is a, c, g, or t
  misc_feature (449)..(451): n is a, c, g, or t
  misc_feature (453)..(453): n is a, c, g, or t
  misc_feature (455)..(455): n is a, c, g, or t
  misc_feature (457)..(457): n is a, c, g, or t
  misc_feature (468)..(468): n is a, c, g, or t
  misc_feature (476)..(476): n is a, c, g, or t
  misc_feature (482)..(482): n is a, c, g, or t
  misc_feature (487)..(487): n is a, c, g, or t
  misc_feature (492)..(493): n is a, c, g, or t
  misc_feature (497)..(497): n is a, c, g, or t
  misc_feature (501)..(501): n is a, c, g, or t
  misc_feature (506)..(506): n is a, c, g, or t
  misc_feature (517)..(517): n is a, c, g, or t
  misc_feature (524)..(525): n is a, c, g, or t
  misc_feature (527)..(528): n is a, c, g, or t
  misc_feature (532)..(533): n is a, c, g, or t
  misc_feature (542)..(542): n is a, c, g, or t
  misc_feature (546)..(546): n is a, c, g, or t
  misc_feature (554)..(555): n is a, c, g, or t
  misc_feature (562)..(563): n is a, c, g, or t
  misc_feature (573)..(574): n is a, c, g, or t
  misc_feature (576)..(576): n is a, c, g, or t
  misc_feature (580)..(580): n is a, c, g, or t
  misc_feature (587)..(588): n is a, c, g, or t
  misc_feature (594)..(594): n is a, c, g, or t
  misc_feature (601)..(601): n is a, c, g, or t
  misc_feature (606)..(606): n is a, c, g, or t
  misc_feature (617)..(617): n is a, c, g, or t
  misc_feature (627)..(628): n is a, c, g, or t
  misc_feature (637)..(638): n is a, c, g, or t
  misc_feature (647)..(647): n is a, c, g, or t
  misc_feature (655)..(655): n is a, c, g, or t
  misc_feature (662)..(662): n is a, c, g, or t
  misc_feature (666)..(666): n is a, c, g, or t
  misc_feature (669)..(670): n is a, c, g, or t
  misc_feature (673)..(674): n is a, c, g, or t
  misc_feature (676)..(676): n is a, c, g, or t
  misc_feature (680)..(681): n is a, c, g, or t
  misc_feature (689)..(689): n is a, c, g, or t
  misc_feature (693)..(694): n is a, c, g, or t
  misc_feature (705)..(709): n is a, c, g, or t
  misc_feature (716)..(716): n is a, c, g, or t
  misc_feature (718)..(720): n is a, c, g, or t
  misc_feature (723)..(723): n is a, c, g, or t
  misc_feature (729)..(730): n is a, c, g, or t
  misc_feature (734)..(734): n is a, c, g, or t
  misc_feature (737)..(737): n is a, c, g, or t
  misc_feature (739)..(740): n is a, c, g, or t
  misc_feature (746)..(746): n is a, c, g, or t
  misc_feature (748)..(748): n is a, c, g, or t
  misc_feature (752)..(752): n is a, c, g, or t
  misc_feature (755)..(755): n is a, c, g, or t
  misc_feature (759)..(759): n is a, c, g, or t
  misc_feature (763)..(763): n is a, c, g, or t
  misc_feature (767)..(767): n is a, c, g, or t
  misc_feature (770)..(771): n is a, c, g, or t
  misc_feature (774)..(774): n is a, c, g, or t
  misc_feature (781)..(781): n is a, c, g, or t
  misc_feature (794)..(794): n is a, c, g, or t
  misc_feature (800)..(801): n is a, c, g, or t
  misc_feature (803)..(803): n is a, c, g, or t
  nbla-03598-f
ccccgnnnggccaaaaaaacnggncaaacnncaanttnnnanaantttttnacanctnacgancngaangaaagacgggggggnnnttnanaaaanngaaanncncncccccagnaaganaancccaanccacancanaacanncnncgatanaccancanaagaanccaaaacacccactacactcacaacgnacancaaagcaagncctttaaacaangaacacaccaccccnaaaanacccccnnnctaccataaacacaaaacactataantgaaccaaaaacaagnaaacnaacanctaanaannaataccgaantccccnnaccgaaaacaacntaacnccatatnnnccccncaannnncaactcanaanacaancnacataannaacccaacaaacacanccnaanaaccnncaannantnccctaaaaaatnnnaanacnnnanancnacacctccacnaccaaccnacgaangcaanaacannaaancacnaaccnaccaacaacanaaaccanncnnacanngaaaccccnaaanccaaaacnncaatacnncctaaaaccnncnccanaaaccannaacctngctctcncccanatcaacccccntaaaacaaannacatcccannacacctaanataccaangcacctnaaancannccnnanaaanncaccaaanccanncaccgcaaaannnnntccccancnnnaanaaaccnnaaanccnannccacanancacnacncaanccanaacntannaanacccacncaaacactcttcntcacanncncg

SEQ ID NO: 115 - DNA, 752 bp, Homo sapiens
  misc_feature (2)..(2): n is a, c, g, or t
  misc_feature (64)..(64): n is a, c, g, or t
  misc_feature (96)..(96): n is a, c, g, or t
  misc_feature (98)..(98): n is a, c, g, or t
  misc_feature (444)..(444): n is a, c, g, or t
  misc_feature (462)..(462): n is a, c, g, or t
  misc_feature (523)..(523): n is a, c, g, or t
  misc_feature (531)..(531): n is a, c, g, or t
  misc_feature (575)..(575): n is a, c, g, or t
  misc_feature (580)..(580): n is a, c, g, or t
  misc_feature (644)..(644): n is a, c, g, or t
  misc_feature (647)..(647): n is a, c, g, or t
  misc_feature (673)..(673): n is a, c, g, or t
  misc_feature (686)..(686): n is a, c, g, or t
  misc_feature (696)..(696): n is a, c, g, or t
  misc_feature (699)..(699): n is a, c, g, or t
  misc_feature (717)..(717): n is a, c, g, or t
  misc_feature (723)..(723): n is a, c, g, or t
  misc_feature (735)..(735): n is a, c, g, or t
  misc_feature (740)..(740): n is a, c, g, or t
  misc_feature (743)..(743): n is a, c, g, or t
  misc_feature (747)..(747): n is a, c, g, or t
  nbla-03598-r1
tnagtttgggtggtagcctgtgactacagtcccagctaatcaggaggctgaagcagaaggaccntttgagcccaggagttccaggttacagtgagngntgatcttgccaacacactctaggctgggtgagacagtgagactccatctctaaaataagaattataaaaataatagcttcatatgtcaacacattcaccaatgctgaggccgatttcctccaaatcattttagtatattaaaccgttataatacatggattttgaggaaagtccttcaattattaacagtagctagtgaatcttttatgtgaatattttcgcaaccatgaggagagaacaccaagcttttgcttcccaccactgctccactggaataagcccatctcattaaggacattacctgccctgccataggacggtgagcagcttcagcctctgcctctgnttttccaaattactcggngaagatcaatattccaggtgtgaagatcccaggacaagcagtaaagatgtgaagagggttncattcacngggattcaacgtttaagccttcattagcacaacaacctttaaanggccnccacccaaattgccaatccaaattgccaatccaaattggggtgtgggctggtgaatcaaaaggncangttccagctactttaagggaataganggggtttcttaanggggaagagnccnaaaggttaactctattgnaaccanggttaaatcccnagccntanaagnactgg

SEQ ID NO: 116 - DNA, 3168 bp, Homo sapiens
  nbla-03614
ttctaggcctgtacggaagtgttacttctgctctaaaagctgcggaattcctcgagcactgttggcctactgggaaaatcaagccatatacatttttttccttcgaaagtgtctaagcaacaaaataaataaatgtattattcattctgggttgtgttaatttttcctgccagaggggaaaaatgaatttacagggaattcctggaagaatatcttgggacctaaaaataaaaatcatggttttattttaagcttgtcaacaggggtgacaagtgtaagaattgtagcccagatgtgcgggaagcaactcataaattctattttccactatgttttatcttgcctgccactttccctaaaatggaaatcatttttagtatcatagagcgagatgggaaacgtggaagtttatttgtaaaagtggcactatggtgagcaagcattcacagggacactggcctattttagcagctggcctctgggagagagggatgccctacagcttggcactggagctctttgggatgctgctgagcttgtcattgctgttcctctttggggtctccaggctgcttttaaattctctaggaggtgaccatgggaccttattagatgagctttaatttctctttctaagttggcttgtgcaaatacagatatctagttttttttcagtcagaggggagaggaaggatagagttgaggagtggacagtaagcatccccattcagaggcagatgcagcctggtttggggagacggtagaggactagaacatattagtgtgtatggagctggcctgggcgctgagatccagagtgaggaatgtgccagagattccatctgtttgagctggcatgaatcatagtgtgaatcagtagatctcttttcttagcaaaaaccagcaaaagcccttcttgtgagggtcatatgaagcggaaggagatgagattctatattgatttagtactagttcatgagctaccaaatctaaaaactaggagtcaggtcagataaaatagcatatttctagcttaaagttttatgatcatgaatcttatagaaacatagttaacttagaaattaaagatttaagattaagttagaaatagaagttgctagaagttctcaaatgtatacttctgacaacttggttaaatccctggcatatgcagaaaagtttctgtgattaaaaaataacagaagtatgagagtttttcgttgtccagccaattttgtagtctatttgagaaggttaaaaacaactgtaaaagctaagtaacaaggaaacaaaaaaatgatgagtatataaccagaaggagcccaggtactataaaagctaagtaacgaggaaacaaaaaaatgatgagtatataaccagaaggaacactcaatttgattcccatatcaggaagttcttgggttcagtgcaagacttgaaacctgacatggtttcattagattgtagaaaacgctttttttttttttttctggacaacagatggaaccatgttgtcggttgttcaaagatggacaggagacagaaatctatcaacctgaagtcagctccaactgcagctgtctgttctcctgaggactgtgctagtggtccacagaggtcaccttgcttatcacatgatattttcttgacgttagttgaagcacatcaccttaggtgacacatgagggccaaaggcctctttctcagggatgtatgtgaaagtgtggtgggttggggaccagctaaggaaaaaaagacatgaaggagaatgcaagcatcttacagtcatcattcagtaagaaaactttatgactggacaaaggaaaacataaacgccctttaacctagaatgcaaatttctagtgatttttacttttttagtgtatcagaagtcactgagcaaggtaagtaccagcacttacagagacggagtcataaaggctgctctctaaaagtagaggatgtgcaaaacctgtagtaccatttaacagatttttgaccttgttaattatgtcattttgaaactggaataaatatgtaattcgaaggttgatttttctgaacaaaagtaagtcaagtcaaagttttctcagagtctactgtttgattcttgagggtattcagaattcaagattgatgtgcatttcaacatttcagtttctgcctaagtgaagcgtcacttaaagccttcgaaattacagatgtaaaatgaggttgcacgtgatgtcagtagctataattcctactctggaggtagctcgatgtgtctgaaggctgagtgagctgcggcaggatgaatgaatctttgacttcacgagatgctgttctagtctgtaaccttgtcgtgtggaatcagcccatctgatgctgaacactaacttgaaatggctggccgaatgcagagtaacacatcagagcactagaccggtggaaagaacctagattgcaagtccagtgaattatctgcatcttcattttgttaggtgtagatttacttttgttattggttgcaattgcaatattttaaaatcatgattatgcgttaactccatctatttctaaaacattggtatttgtgtcatttttagtgtagcttgatttttgttttcttctttctggtacaaaaacgagtttctccctccaacccctgccatgtatatctgtatcatgtatatctgtatctacattcctgtctactatcaatgcctactatttacaaggtagttcagttcgtttcagatcaactagaatttattgagtactctgtatgctaatccctgtaccaggggcttgggatataacagtgaataagttcctggggcttacatcagtcaatatagggttactgtctattgaacaagattatttttgggtttctatctatttggggatatgataatgcatgtatttattcctaaccatcacacaataatattatgaaacaatgttagtaggaggaagatgagagccttcattttaactgggaggacttggttctgtctaagatgttgcttttgttatgggttagtgcctattagataacattctgtttctgtgactgattatttctttttgaccttctgagttttagtttgtccactgagttttaggtaaaaaaaaaaaaaaaaaggccacatgtgctcgagctgcaggtcgcggccgctagac

SEQ ID NO: 117 - DNA, 758 bp, Homo sapiens
  misc_feature (6)..(6): n is a, c, g, or t
  misc_feature (273)..(273): n is a, c, g, or t
  misc_feature (450)..(450): n is a, c, g, or t
  misc_feature (517)..(517): n is a, c, g, or t
  misc_feature (546)..(546): n is a, c, g, or t
  misc_feature (637)..(637): n is a, c, g, or t
  misc_feature (698)..(698): n is a, c, g, or t
  misc_feature (733)..(733): n is a, c, g, or t
  misc_feature (758)..(758): n is a, c, g, or t
  nbla-03615-f
actggnttctttaaaaaaatcccaacaaaagtaagataatgcctttcttaaactctcttcataaatctgtactattacattcctctttttaaccagtatcataagttggttttcatttatttaaagcttattggaaaagttagaattataggagtagtaggcatatacactcacatacaaggcaaaacctatattggtgcctaactttattatacatgagattgggccagaaatgggaaaagacaggtatttaccatgaatttttattattgntctttctacataagattgctaacttttagaacataaactgtataattataagccataacctcttccattttgtaaaattaatactctgtcaatcagaattaagagacagccacatttgggccataagtgaatttaatactgcttttcaacacaaagaaatggtttccaaatatttgnattaagttcgttgtaggtcagtatacattttatgggtggtctgctaatgccactttgtaaaccctgnataatagtcattactaaacaaacttcagntatttttaagtaaatcatatttcgacaattattccaacaagtttaaagccttaagtaaatcatcttttgacaattcttcaacaaagcttgncagaatttggataaactgataaaagtcaatatttacaaattttttaaaatcagtggcactnaatattttcaactggaatttttaacccattaaggnaagtggaataaatctattttagtcn

SEQ ID NO: 118 - DNA, 778 bp, Homo sapiens
  misc_feature (6)..(6): n is a, c, g, or t
  misc_feature (13)..(13): n is a, c, g, or t
  misc_feature (63)..(64): n is a, c, g, or t
  misc_feature (441)..(441): n is a, c, g, or t
  misc_feature (557)..(557): n is a, c, g, or t
  misc_feature (577)..(577): n is a, c, g, or t
  misc_feature (654)..(654): n is a, c, g, or t
  misc_feature (663)..(663): n is a, c, g, or t
  misc_feature (695)..(695): n is a, c, g, or t
  misc_feature (704)..(704): n is a, c, g, or t
  misc_feature (717)..(717): n is a, c, g, or t
  misc_feature (725)..(725): n is a, c, g, or t
  misc_feature (727)..(727): n is a, c, g, or t
  misc_feature (736)..(736): n is a, c, g, or t
  misc_feature (747)..(747): n is a, c, g, or t
  misc_feature (763)..(763): n is a, c, g, or t
  misc_feature (768)..(768): n is a, c, g, or t
  nbla-03615-r1
catttnacatttnaaagctataattttcaattatgtccttttgtttttcctgagatgataaanntgaaaggttacttgacattcattgagattatgaaacattctaataaaatatacttttcagtttagttatggaagcccaaaatgtattcagatggaactgaaatatttctcaatcagtaaaatgaagtatttcacaagtttttctgatgtgaataactgatattattaggttactgaaaaatgtgattcataatgattattatttggttgagtgtctacaatgtgctaggcactgacaaacataatataaattcattaccttcttgaatattcctaccaaatgaacttggctgctatcctcaattaacaaatgaaaaaacagacaaaagctagaaagcaaactcatgctctgatccatagcccaagctcttgagctgntatataaagaaatctatgctatgcagatttcagtctggagtctctgagcatagacagttcatgaagatcaagcctggagaatagtcttcttataccggggaggtccggcatactgnctaccatcaaatcactactnaagcagttcaaatcatttctaaccaaacactttggatggattctagaaaatgatacctccaaaccataccctggaancctactccnttttactatttaataatcccttttaaaaaggnggccttttntaacagcaaaganggaaacancntgatgggtnaaaggtttggnttaataacagatccgntttgnccttctagat

SEQ ID NO: 119 - DNA, 757 bp, Homo sapiens
  misc_feature (10)..(10): n is a, c, g, or t
  misc_feature (26)..(26): n is a, c, g, or t
  misc_feature (102)..(102): n is a, c, g, or t
  misc_feature (497)..(497): n is a, c, g, or t
  misc_feature (515)..(515): n is a, c, g, or t
  misc_feature (551)..(551): n is a, c, g, or t
  misc_feature (557)..(557): n is a, c, g, or t
  misc_feature (564)..(564): n is a, c, g, or t
  misc_feature (580)..(580): n is a, c, g, or t
  misc_feature (585)..(585): n is a, c, g, or t
  misc_feature (614)..(614): n is a, c, g, or t
  misc_feature (622)..(622): n is a, c, g, or t
  misc_feature (648)..(648): n is a, c, g, or t
  misc_feature (692)..(692): n is a, c, g, or t
  misc_feature (722)..(722): n is a, c, g, or t
  misc_feature (730)..(730): n is a, c, g, or t
  misc_feature (743)..(743): n is a, c, g, or t
  nbla-03636-f
gcctactgtnacagccaagcagtggnaagagctttaaactcagcatcaccaaacaggacgatggaggggcccctattttggaatacattgtgaaatatgggnagtaaagataaggaagaccaatggctagagaaaaaagtgcaaggaaataaagaccacatcattttggagcatctccagtggaccatgggtatgaagttcagattacagctgccaatagattgggatattctgaaccgacagtttatgaattcagcatgccaccaaagcccaacattatcaaagataaatgctgtgaagcgaataaaggcgaaaatggaagccagtcgtggcagctgaatgctgctgggttttctttcattatagccataagtttgtcttgcgtgttttaatgtcattggtatatcatatggtatatcctcttatgccctgaaaattaaaaaaaaaatagtaatagcaaggcttatctaaaattataataaaatatttcctaaggnccaattaattatgcatgnatcttcacccatgaatgattaaaccttttctccttncccaantatcaanccttttaagtggatantttgncagaaaatcaaatggaaggaattcaatcngggattgngtactttcaagttaccagttcactgnataccatccttaatctaaaatttccattaattcctaaaagtganccttgtaaatacctggtaccttggccttgnaacttaancctttggtacatntaaccttcattatt

SEQ ID NO: 120 - DNA, 751 bp, Homo sapiens
  misc_feature (56)..(56): n is a, c, g, or t
  misc_feature (83)..(83): n is a, c, g, or t
  misc_feature (102)..(103): n is a, c, g, or t
  misc_feature (109)..(109): n is a, c, g, or t
  misc_feature (250)..(250): n is a, c, g, or t
  misc_feature (298)..(298): n is a, c, g, or t
  misc_feature (373)..(373): n is a, c, g, or t
  misc_feature (457)..(457): n is a, c, g, or t
  misc_feature (561)..(561): n is a, c, g, or t
  misc_feature (568)..(568): n is a, c, g, or t
  misc_feature (599)..(599): n is a, c, g, or t
  misc_feature (601)..(601): n is a, c, g, or t
  misc_feature (632)..(632): n is a, c, g, or t
  misc_feature (641)..(641): n is a, c, g, or t
  misc_feature (678)..(678): n is a, c, g, or t
  misc_feature (703)..(703): n is a, c, g, or t
  misc_feature (711)..(711): n is a, c, g, or t
  misc_feature (718)..(718): n is a, c, g, or t
  misc_feature (726)..(726): n is a, c, g, or t
  misc_feature (729)..(729): n is a, c, g, or t
  misc_feature (732)..(732): n is a, c, g, or t
  misc_feature (738)..(739): n is a, c, g, or t
  nbla-03636-r1
ttttttttttgagacggagtctcggtctgttgcccaggctggagtgcagtggcgcnatctcggctcactgcaagctccgcctnccgggttcacgccatgctnntgcctnagcctcccgagtagctgggactacaggcgcccgccaccacgcctggctaattttttgcattttttagtagagacggggttttaccgtgttagccgggatggtctcaatctcctgacctcgtgatccacctgcctcggcctnccaaagtgctaggattacaggcgtgagccaccgcgcccagccggccanaagtgtgttttatcggttgatgggttgcttctgcagtctacaggtctattactagattacaagaaaggatagcanttgacagctaggagtttggaaaagataagttaaaagaaaatctactatgaaagaaaggcctaccctcatatgaaaagattctgnagctatctctttaaaaagagacacgaaaaatatttctggtcaacaaaaatgatagcttttgatgaatgaatcacagaagtccagaacccaatcattggatttanccaagtntgtatgggcacttttatgcatatatgtcatntngggtggttcctattggcctaaataataagtngtaaaagtnccttgttaaaatggggttcaagtgaaaacccaacctntttacttggtttgaattccttaggnaaagattncttaagngaaaatgngtnttnccttanngaaatttgcaaa

SEQ ID NO: 121 - DNA, 4219 bp, Homo sapiens
  nbla-03646
cactgttggcctactgggctggcggcagtgacaggaggcgcgaacccgcagcgcttaccgcgcggcgccgcaccatggagcccgccgtgtcgctggccgtgtgcgcgctgctcttcctgctgtgggtgcgcctgaaggggctggagttcgcttatcttcgatatctactactacgtgcgcgcctgggtggtgttcaagctcagcagcgctccgcgcctgcacgagcagcgcgtgcgggacatccagaagcaggtgcgggaatggaaggagcagggtagcaagaccttcatgtgcacggggcgccctggctggctcactgtctcactacgtgtcgggaagtacaagaagacacacaaaaacatcatgatcaacctgatggacattctggaagtggacaccaagaaacagattgtccgtgtggagcccttggtgaccatgggccaggtgactgccctgctgacctccattggctggactctccccgtgttgcctgagcttgatgacctcacagtggggggcttgatcatgggcacaggcatcgagtcatcatcccacaagtacggcctgttccaacacatctgcactgcttacgagctggtcctggctgatggcagctttgtgcgatgcactccgtccgaaaactcagacctgttctatgccgtaccctggtcctgtgggacgctgggtttcctggtggccgctgagatccgcatcatccctgccaagaagtacgtcaagctgcgtttcgagccagtgcggggcctggaggctatctgtgccaagttcacccacgagtcccagcggcaggagaaccacttcgtggaagggctgctctactccctggatgaggctgtcattatgacaggggtcatgacagatgaggcagagcccagcaagctgaatagcattggcaattactacaagccgtggttctttaagcatgtggagaactatctgaagacaaaccgagagggcctggagtacattcccttgagacactactaccaccgccacacgcgcagcatcttctgggagctccaggacatcatcccctttggcaacaaccccatcttccgctacctctttggctggatggtgcctcccaagatctccctcctgaagctgacccagggtgagaccctgcgcaagctgtacgagcagcaccacgtggtgcaggacatgctggtgcccatgaagtgcctgcagcaggccctgcacaccttccaaaacgacatccacgtctaccccatctggctgtgtccgttcatcctgcccagccagccaggcctagtgcaccccaaaggaaatgaggcagagctctacatcgacattggagcatatggggagccgcgtgtgaaacactttgaagccaggtcctgcatgaggcagctggagaagtttgtccgcagcgtgcatggcttccagatgctgtatgccgactgctacatgaaccgggaggagttctgggagatgtttgatggctccttgtaccacaagctgcgagagaagctgggttgccaggacgccttccccgaggtgtacgacaagatctgcaaggccgccaggcactgagctggagcccgcctggagagacagacacgtgtgagtggtcaggcatcttcccttcactcaagcttggctgctttcctagatccacactttcaaagagaaacccctccagaactcccaccctgacagcccaacaccaccttcctcctggcttccagggggcagcccagtggaatggaaagaatgtgggatttggagtcagacaagcctgagtccagttccccgtttagaactcattagctgtgtgactctgggtgagtcccttaacccctctgagcccgggtctcttcattagttgaaagggatagtaatacctacttgcaggttgttgtcatctgagttgagcactggtcacattgaaggtgctgggtaagtggtagctcttgttgcttcccgttcagcgtcacatctgcagtggagcctgaaaaggctccacattaggtcacctgtgcacagccatggctggaatgatgaaggggatacgctggagttgccctgccatcgcctccatcagccagacgaggtcctcacaggagaaggacagctcttccccaccctgggatctcaggagggcagccacggagtggggaggccccagatgcgctgtgccaaagccaggtccgaggccaaagttctccctgccatccttggtgccgtcctgccccttcctccttcatgcctgggcctgcaggcccaccccagccaccactgagtccactcggagtgccctgtgttcctggagaaggcattccagggttgaatcttgtcccagcctcagcctgggacacctaggtggagagagtggtctccgctctgaattggatccaggggacctgggctcattcttcttggctcaccaaccctgcaggcctcatctttcccaaaacccactttgtcttggtgggagtgggtccgcgctgctctgcagcaggggctggggagtggacagcatcaggtgggaaagtggagtccaccctcatgtttctgtaggattctcaccgtggggctggaagaaaagagcatcgacttgatttctccaaccactcatccctctttttctttcttccaccactccccaccccagctgtagttaatttcagtgccttacaaatcctaagctcagagaaagttccatttccgttccagagggaagggaacctccctaggtccttccctggcttgttataacgcaaagcttggttgtttatgcaactctatcttaagaactgcccagcctcagctgaaaacccgaatctgagaaggaattgcgtcatgtaagggaagctggaattaagggagctgagccagtcatggttgtggcgtgtgagtcaggagacctaggtttcagcccctctctactgtcagcgagctgtgcaacgtgggcaagtcattgtcctctgagctgcagtttcctcatctgtcacatcgctacagacaagacctccctggaacccttctgattgtcttagacactgtggttgcaaaacccacggaaagcctcatttgtgtggaaagtcagaggaaaaatgatccagtggacacttggggattatctgtcattcaagatccttccttcaaccccaaggtcagctcccatctcatttccagaaaggctcatacctggcttgcagggaagcatctgtcttgtcattccaggtgccagaatcctctcagagtcattgaagggtgttcacccatcccacccaaggcttggcacactgccagtgtcttagcagggtcttgtgagggctgggggcatccaggcactcagaaggcaaaggaaccaccctacccatttggcctctggagggggcagaagaaagaaagaaacctcatcctatattttacaaagcatgtgaattctggcattagctctcataggagacccatgtgcttccttgctcagtgcaaaactgatgattctacttgctgtagatgaatggttaacacgagctagttaaacagtgccattgttttgccagtgaagcctccaaccctaagccactgggacggtggccagagatgccagcagcctctgtcgcccttagtcatataaccaaaatccagaccttatccacaacccggggcttggaaaggaaggtattttggaatcacaccctccggttatgttgctccagtaaaatcttgcctggaaagaggcagtcttcttagcatggtgagctgagttcatggcttttttttgtagccagtcctgtccctggccatccatgtgatggttttggatggagttaaacttgatgccagtgggcagtgcatgtggaaagtatcagagtaaggctctcccctccagagccctgagtttcttggctgcatgaaggttttctttagaatcagaattgtagccagtttctttggccagaaggatgaatacttggatattactgaaagggaggggtggagatgggtgtggcagtgtatggtgtgtgatttttattttcttctttggtcatgggggccaaggagaaaggcatgaatcttccctgtcaggctcttacagccacaggcactgtgtctactgtctggaagacatgtccccgtggctgtggggccgctgcttctgtttaaataaaagtggcctggaaaaaaaaaaaaaaaaaaaaaaaaaaggccacatgtgctcgagctgcag

SEQ ID NO: 122 - DNA, 726 bp, Homo sapiens
  misc_feature (1)..(1): n is a, c, g, or t
  misc_feature (570)..(570): n is a, c, g, or t
  misc_feature (660)..(660): n is a, c, g, or t
  misc_feature (692)..(692): n is a, c, g, or t
  misc_feature (701)..(701): n is a, c, g, or t
  misc_feature (715)..(716): n is a, c, g, or t
  nbla-03652-f
ngttgccctactggctcttggcggcggaggctttgtctcgtgggctggtccccagcggctccctccccgaacagctgctgctccagggaggaagcggcgcgggtgctgctccagcttcccggtgctgaaaaccggagggctcgtcatccaccactaccatgtaagggccatgagaagggctcatcctggcgcagcgcggacatggaggaggacttattccagctaaggcagctgccggttgtgaaattccgtcgcacaggcgagagtgcaaggtcagaggacgacacggcttcaggagagcatgaagtccagattgaaggggtccacgtgggcctagaggctgtggagctggatgatggggcagctgtgcccaaggagtttgccaatcccaccgatgatactttcatggtggaagatgcagtggaagccattggctttggaaaatttcagtggaagctgtctgttctcactggcttggcttgggtggtctttgtaggcatgatgtccagctccacgctctggggaaatatctcagaccagtacggcaggaaaacagggctgaaagatcancgtgctgtggactctgtactatggcatccttagtgcatttgcgcccgtgtatagctggatcctggtgcttccggggcctggtgggctttnggaatcggaggagttcccaatccgtgaccttnatccgagtncttccatgaaagcnnacttaatgtt

SEQ ID NO: 123 - DNA, 749 bp, Homo sapiens
  misc_feature (103)..(103): n is a, c, g, or t
  misc_feature (572)..(572): n is a, c, g, or t
  misc_feature (581)..(581): n is a, c, g, or t
  misc_feature (601)..(601): n is a, c, g, or t
  misc_feature (609)..(609): n is a, c, g, or t
  misc_feature (633)..(633): n is a, c, g, or t
  misc_feature (640)..(640): n is a, c, g, or t
  misc_feature (660)..(660): n is a, c, g, or t
  misc_feature (682)..(682): n is a, c, g, or t
  misc_feature (688)..(688): n is a, c, g, or t
  misc_feature (695)..(695): n is a, c, g, or t
  misc_feature (699)..(699): n is a, c, g, or t
  nbla-03652-r1
tgaatccctttttttggtccaggtcatactcttgggtgagttcttgatgtcggcagtgacaatcagtgccccagttggggcctgccagccccccaagctctgnagcctcaaagaccagctcagtcccccatcggtcactattcctgagagccagagttcgacctggtaacacctgcaccgtgcattcctcggccgaccatctcctggccccactcccggtggctggactcctgcagtcctcggcctttggtctcaatgggcaaaaagcaggaggccagggcagccaggaggcagcagccactgtaaactgccagagtcaggtacacagaggattccagcatcacctgggcgatgaacggagtgatgagagcacccactcttgccatgccgctgcaggtgcccaggccgagggcccgcgttgccgtggggtagacctcaggtgtgtaaacatatgccgcttgaaagcctccagaaataaacgctcttgcaatgaagagtaacagagtgagcacatttcttcaacacagataaacagcaggaggcttgcagaaggagaagatgacaaagcacanggccatggncttcttgcgccccaagcggncaataatncacagagtcacaagggcacctggnaactcanaaaagggtgggtccacaagnaagtccatgtaatccttcttanttaagnacttcgnaggncaagcttggaattttggcctttaaagccttttttcgacttggagatgccc

SEQ ID NO: 124 - DNA, 1990 bp, Homo sapiens
  nbla-03755
ttctaggcctgtacggaagtgttacttctgctctaaaagctgcggaattcctcgagcactgttggcctactggcaaaaaaaagaataatgacccggcccccgccctctgcccccagctgctcctcgcagttcggttaattggttaatcacttaacctgcttttgtcactcggctttggctcgggacttcaaaatcagtgatgggagtaagagcaaatttcatctttccaaattgatgggtgggctagtaataaaatatttaaaaaaaaacattcaaaaacatggccacatccaacatttcctcaggcaattccttttgattcttttttcttccccctccatgtagaagagggagaaggagaggctctgaaagctgcttctgggggatttcaagggactgggggtgccaaccacctctggccctgttgtgggggtgtcacagaggcagtggcagcaacaaaggatttgaaacttggtgtgttcgtggagccacaggcagacgatgtcaaccttgtgtgagtgtgacgggggttggggtggggcgggaggccacgggggaggccgaggcaggggctgggcagaggggagaggaagcacaagaagtgggagtgggagaggaagccacgtgctggagagtagacatccccctccttgccgctgggagagccaaggcctatgccacctgcagcgtctgagcggccgcctgtccttggtggccgggggtgggggcctgctgtgggtcagtgtgccaccctctgcagggcagcctgtgggagaagggacagcgggtaaaaagagaaggcaagctggcaggagggtggcacttcgtggatgacctccttagaaaagactgaccttgatgtcttgagagcgctggcctcttcctccctccctgcagggtagggggcctgagttgaggggcttccctctgctccacagaaaccctgttttattgagttctgaaggttggaactgctgccatgattttggccactttgcagacctgggactttagggctaaccagttctctttgtaaggacttgtgcctcttgggagacgtccacccgtttccaagcctgggccactggcatctctggagtgtgtgggggtctgggaggcaggtcccgagccccctgtccttcccacggccactgcagtcaccccgtctgcgccgctgtgctgttgtctgccgtgagagcccaatcactgcctatacccctcatcacacgtcacaatgtcccgaattcccagcctcaccaccccttctcagtaatgaccctggttggttgcaggaggtacctactccatactgagggtgaaattaagggaaggcaaagtccaggcacaagagtgggaccccagcctctcactctcagttccactcatccaactgggaccctcaccacgaatctcatgatctgattcggttccctgtctcctcctcccgtcacagatgtgagccagggcactgctcagctgtgaccctaggtgtttctgccttgttgacatggagagagccctttcccctgagaaggcctggccccttcctgtgctgagcccacagcagcaggctgggcgtcttggttgtcagtggcggcaccaggatggaagggcaaggcacccagggcaggcccacagtcccgctgtcccccacttgcaccctagcttgtagctgccaacctcccagacagcccagcccgctgctcagctccacatgcatagtatcagccctccacacccgacaaaggggaacacacccccttggaaatggttcttttcccccagtcccagctggaagccatgctgtctgttctgctggagcagctgaacatatacatagatgttgccctgccctccccatctgcaccctgttgagttgtagttggatttgtctgtttatgcttggattcaccagagtgactatgattgaaaagaaaaaaaaaaaaaaaaaggccacatgtgctcgagctgcaggtcgcggccgctagac

SEQ ID NO: 125 - DNA, 2180 bp, Homo sapiens
  nbla-03771
cactgttggcctactggcagataaagccttatgctgcccaccagcccactaaatgtattaaatacctgtctctatgtagcttatgtaaaaactcaatgttgactgtcccgtgtctgctgcatttaaaagctcattgtgattctatcatcttgctatgccaatgccttatgttatggtgtcatgtatataggccatggtacaaaagtgactgtcaactgcttactcaacatctagtcagaaaaggtctgaggcagtgcaataacgcttttagtcaaactggctcactgttggagtcatttacatctgtgtattctttaccgtaaatactgaaatagtattttttaactgttttttcaggcttgtaataaatatctgtgtcatatctacatagtcaaaatacattgagtaattcagtttaaaagtgttgcctactaacaaactaaagagaaacatctactgattttcccatataattgcttattttccattgccaatgtagacctgcctggaatggtgtctttcaccactatcatgtgtaaaataaagggaggctattgtggtgaattttcacctgtctgacattagctctttcactagtcaaaggatgtacatacctcagaggtgacctgactaccgaggtccagttttcaaaagtgcatcttattttaatttttgtctccaaaaattaaaattggatgtctacaaaactaacatatgtagactttcaaaggccagcattggtggggaagggaaaagaaaggatggaaggatggaaggaacgaagggtgatgaggagatgaagggagagggaggggaaagaaaagaacagaaaaaagctaatagaggaaggtaaatctctaaatgagttaaataaggcttaaataaagtttgcatggtatattctctaaaagttgattggcgtggaggaggctgtatgtgtttgtgtgtgtatgcacatgggcatgtctatgtgtaaggtcagaagggggagcctgaattatctactgcttttttggttaactagtcctatttttaaaactttgtctaactcccaaaacttattaatgcgacatgtagtactgaaattagaagattattgttaaactcaggacagctctgtggagattcacaaagtaatttcatgaaaacttatgaggaagttgttcagtactgtcactaattaacgcgcacaaaaaaaaaacttgtgagtaattatgggtgatttcgctgcaaaacaaattagtatatgaattattattttttctcaaattgtagaggttttgtttctattaagtctctaacatttcccagattaaaaataccaaaactattttttaaacttaaggaatagagtatcagaaattaaccattaaattaatagttcttaaagttgctatgtatatggtaagtaaaacaatttcctatttctaagttatacatggtattagatttctaggtacagtcgcatgaagcattattgacttttattaacttcagtgttttagagggttttcatactagtctatgaatgctctgaatgctgcagggaaaaagaagcacaatcagtatttcattatttatgaattctcaattgaattatcctatcctgtccacacacataatagcattagcatttcttcttataccatgttgaaatacttttaatacaaactctcaatagaagcttaaacataagtggttaagtcttgttgtctagtctcattcacctgcctcaacatgctttctttcattctatttgcatacaaaatgttcttatttcagttttgtagacaggatatgagttagcatactcgtgtttgttcagctgtccatcctgcatcgttactacaatgcctttttctgccatttaatggtgtttgtatcaatgttcccatatctgctgcattttaactccataaaaaggaaatgtgatttcgtattaatagttttgttgatcaactcaatatttctgcaccaatcagcatacctatatgcatgtagtagtctgtacaattgttcaacatcaaaatacttgtttactttatgtcaaaatgtctataaaattgctggcattgttctccatttcagtctggtagaataagcgagatagaaaataaatgtgtaaatgaaaaaaaaaaaaaaaaaaaaaaaaaaaaaggccacatgtgctcgagctgcag

SEQ ID NO: 126 - DNA, 2078 bp, Homo sapiens
  nbla-03777
cactgttggcctactggtttaatctcattttctcctaaagttcttctcttcaatatgatctgcaaagggttgaaagtgctgtcctccaaaccaggcgtaagaaagtggttacagataaagcaagtaaatccattaaagaagaaatgggaagatctgttgtgtgccttatctgacccagcattatcgctggaggggaagtgcttatagggaaggaagagaagtttggtcaattgatgcagtctcagtatgatgacagctggtgacttcctgagggttattcatcacacttcagcagggtgatgttttcaaagcctgcgtgtgaccatgtcactcctctgttctccagcgctttcaaaataaaactgaaatccgtctcagagggccagtctcagagtatcccctgccagccccatccttcactgctcagcagtcacctccttccccctcctcatccttttgaggtctcttctgatccttcaggggccagcttctctccgtcccatggttgtttgcctatgctgatcccctacatggatctccggtcacctccatcactcttacctggttagtctctccctggcctttatcccaggtcagcttcgcttctgcaggaatgcctgccttgaaacctcaggtcctcctgttccccctcttagagcactgggctattctcctgggaggcagtaattccagtagtaatttgcatacatttgtaagcagttttgattaatgcctgttgtttccactagactctatgctctgtaggggacaaatcttgtctgctttttgctcatcaatttttccccagcacagagctcaatactggcactggtaaacccttgagaaaatgattaaaagcctctaagatgcatgcagttatgaagaaccaacagaaggtacaggtggcatgggacagcagtcaggaagcaatttggcttaaggaggaaggccagtgactcacagatggagtctcagcacttcccttgcccgtagaagtgagaaacaatacaggtagtcacagcatagtaaaaatttcaggccaggcacggtggctcacggctgtaatcccagcactttgggaggctgatgtgggtgggtcacaaggtgaagagatcaggagcatcgtggccaacatggtgaaaccccatctctactcaaagtgcaaaagttaactgggcatggtgacacaggcctttagacccagctgctcgggagactgaggcgggagagtcgcttgaacccaggaggaagaggttgcagtcagtcgacatcacgccattgcactccagcctggcaacagagcgagacgtgtctttaaaaaaaaaaaaatcagatagcagtttcatatgactagaggctgtgggctgatcagatcctgaaaaaccgggcatggaccaagctggctaagaccaagtggacccaacatggtgctgaatttgacctaggattcacctaggacctcgtgatgtgtttgttaacatcctaagtcactgtgacttgggatgttaatgagtgacttaccatgttaatgagcatatcacgaggtcctaggtgaccagcaccatgaattccgagaatacctacgtttggtgtaaaaatggatggcatcacaattctaagaaatttccaccctttcccaggaattttcataagtattccaccccttggctaaagaaacacataaaggtagcagccccaaatccccttaggcatggtgctctcttgagtccgcctacactccccctttcttgagtgtgtacttttcccgttgttataaatctctgtacttccactgttgcctgactcatccttgaattccttcttgagacggtgtcaagagcctggacacctgccgggatcagggtcccaccagcatttggggacctccccaagcccactagtatcagtagagtccctataggtaattgtctaataagtggaaggtgggtgtagaagtttcaagaaaccaaagaaatgtcagatgtgtcatttgacccaaaagaaaagcgttttaaaggaagttaatgaaatgcagtcagaaaaaaaaaaaaaaaaggccacatgtgctcgagctgcag

SEQ ID NO: 127 - DNA, 1957 bp, Homo sapiens
  nbla-03779
gaattcctcgagcactgttggcctactgggatcctgtttgacatttttatggctgtatttgtaaacttaaacacaccagtgtctgttcttgatgcagttgctatttaggatgagttaagtgcctggggagtccctcaaaaggttaaagggattcccatcattggaatcttatcaccagataggcaagtttatgaccaaacaagagagtactggctttatcctctaacctcatattttctcccacttggcaagtcctttgtggcatttattcatcagtcagggtgtccgattggtcctagaacttccaaaggctgcttgtcatagaagccattgcatctataaagcaacggctcctgttaaatggtatctcctttctgaggctcctactaaaagtcatttgttacctaaacttatgtgcttaacaggcaatgcttctcagaccacaaagcagaaagaagaagaaaagctcctgactaaatcagggctgggcttagacagagttgatctgtagaatatctttaaaggagagatgtcaactttctgcactattcccagcctctgctcctccctgtctaccctctcccctccctctctccctccacttcaccccacaatcttgaaaaacttcctttctcttctgtgaacatcattggccagatccattttcagtggtctggatttctttttattttcttttcaacttgaaagaaactggacattaggccactatgtgttgttactgccactagtgttcaagtgcctcttgttttcccagagatttcctgggtctgccagaggcccagacaggctcactcaagctctttaactgaaaagcaacaagccactccaggacaaggttcaaaatggttacaacagcctctacctgtcgccccagggagaaaggggtagtgatacaagtctcatagccagagatggttttccactccttctagatattcccaaaaagaggctgagacaggaggttattttcaattttattttggaattaaatacttttttccctttattactgttgtagtccctcacttggatatacctctgttttcacgatagaaataagggaggtctagagcttttattccttggccattgtcaacggagagctggccaagtcttcacaaacccttgcaacattgcctgaagtttatggaataagatgtattctcactcccttgatctcaagggcgtaactctggaagcacagcttgactacacgtcatttttaccaatgattttcaggtgacctgggctaagtcatttaaactgggtctttataaaagtaaaaggccaacatttaattattttgcaaagcaacctaagagctaaagatgtaatttttcttgcaattgtaaatcttttgtgtctcctgaagacttcccttaaaattagctctgagtgaaaaatcaaaagagacaaaagacatcttcgaatccatatttcaagcctggtagaattggcttttctagcagaacctttccaaaagttttatattgagattcataacaacaccaagaattgattttgtagccaacattcattcaatactgttatatcagaggagtaggagagaggaaacatttgacttatctggaaaagcaaaatgtacttaagaataagaataacatggtccattcacctttatgttatagatatgtctttgtgtaaatcatttgttttgagttttcaaagaatagcccattgttcattcttgtgctgtacaatgaccactgttattgttactttgacttttcagagcacacccttcctctggtttttgtatatttattgatggatcaataataatgaggaaagcatgatatgtatattgctgagttgaaagcacttattggaaaatattaaaaggctaacattaaaagactaaaggaaaaaaaaaaaaaaaaaaaaaaaaaaaaggccacatgtgctcgagctgcag

SEQ ID NO: 128 - DNA, 775 bp, Homo sapiens
  misc_feature (2)..(2): n is a, c, g, or t
  misc_feature (5)..(5): n is a, c, g, or t
  misc_feature (7)..(7): n is a, c, g, or t
  misc_feature (10)..(10): n is a, c, g, or t
  misc_feature (15)..(18): n is a, c, g, or t
  misc_feature (20)..(20): n is a, c, g, or t
  misc_feature (25)..(25): n is a, c, g, or t
  misc_feature (286)..(286): n is a, c, g, or t
  misc_feature (318)..(318): n is a, c, g, or t
  misc_feature (573)..(573): n is a, c, g, or t
  misc_feature (595)..(595): n is a, c, g, or t
  misc_feature (630)..(630): n is a, c, g, or t
  misc_feature (713)..(713): n is a, c, g, or t
  misc_feature (751)..(751): n is a, c, g, or t
  misc_feature (759)..(760): n is a, c, g, or t
  misc_feature (762)..(762): n is a, c, g, or t
  nbla-03794-f
gnggngnggnggttnnnntntgaantcctttagcactgtcggcctactgggttgtggttggtgtgcgggtttcggttggaggactcgttggggaggtggcctgcgcttgtagagactgcatccccgagacgatggcggagggagataatcgcagcaccaacctgctggctgcagagactgcaagtctggaagagcagctgcaaggatggggagaagtgatgctgatggctgataaagtcctccgatgggaaagagcctggtttccacctgccatcatgggtgtggnttctttggtgtttctgattatctactatctanatccatctgttctgtccggcgtttcctgttttgttatgtttttgtgcttggctgactaccttgttcccattctagcgcctagaatttttggctccaatagatggaccactgaacaacagcaaagattccatgaaatttgcagcaatctagtaaaaactcgacgcagagctgtgggttggtggaaacgcctcttcacactaaaggaagaaaaacctaagatgtacttcatgaccatgatcgtttccttgctgcggntgcttgggtgggacaacaagtncacaacctgcttcttacctacctgatagtgacttncttactattgctttctggactaaaccaacatggaatcattttgaagtcattggaatgggccaagaaggagataaaccaacttntcaaaccaaaagaaaagaaaaacgaatgatcatctgcnttaatcanngngaataatgcacac

SEQ ID NO: 129 - DNA, 784 bp, Homo sapiens
  misc_feature (2)..(2): n is a, c, g, or t
  misc_feature (5)..(5): n is a, c, g, or t
  misc_feature (11)..(11): n is a, c, g, or t
  misc_feature (16)..(19): n is a, c, g, or t
  misc_feature (43)..(43): n is a, c, g, or t
  misc_feature (140)..(140): n is a, c, g, or t
  misc_feature (570)..(570): n is a, c, g, or t
  misc_feature (578)..(578): n is a, c, g, or t
  misc_feature (580)..(580): n is a, c, g, or t
  misc_feature (597)..(597): n is a, c, g, or t
  misc_feature (606)..(606): n is a, c, g, or t
  misc_feature (666)..(666): n is a, c, g, or t
  misc_feature (680)..(680): n is a, c, g, or t
  misc_feature (691)..(691): n is a, c, g, or t
  misc_feature (709)..(709): n is a, c, g, or t
  misc_feature (723)..(723): n is a, c, g, or t
  misc_feature (725)..(725): n is a, c, g, or t
  misc_feature (744)..(744): n is a, c, g, or t
  misc_feature (746)..(746): n is a, c, g, or t
  nbla-03794-r1
gnggngggggnggttnnnntttgtgtggcctttgtttttttcnttttttttttttttttttttttaagattccagctttttttattttttccccttttacacaaaacaaagtagaagaaataatacaggattaaaactgnaaaagtagttaatcagtagaatatgtatgcacacaaaaaatccagataggaagacaggcttatttacaatgaaagtaaggtaaaattaacgtagttttcttatgaaataataaaaaaaaatcaaacatatgctacaatgggcaccactgttcacagcaatattaaagaggagaaaacaacacttatttaatagggacagatataccacaaggtacaacatcagtgcaataaattcacaaaactatattacagctagttaatcagtttaagaattgttcccgtcagtcacattttttggccctcagaagttcattcctaaagatttcaactactctaaatttctagctaccaagaagttaagaatgattataagaagctttccaaggagttatgaaatctttgtagaccagaggccaactatcatcacctngagtctgntnttaccaacagcccttgnatttttcanggagaaatctctaggaaaaagcagacaccagtgtagtactatcttccatgtcaaacctangggactaaaatggncagtattaccnttaaaatggtactttganggttaccctaaaangnttattctgggctcaaaaantnggttaggaatatcttttctggaaagaatattggcttaa

SEQ ID NO: 130 - DNA, 772 bp, Homo sapiens
  misc_feature (428)..(428): n is a, c, g, or t
  misc_feature (586)..(586): n is a, c, g, or t
  misc_feature (715)..(715): n is a, c, g, or t
  misc_feature (736)..(736): n is a, c, g, or t
  misc_feature (769)..(769): n is a, c, g, or t
  nbla-03804-f
cactgttgccctactggagatgaaaaaaaacaacatcccagagccagttgtcatcggaatagtctggtcaagtgtaatgagcactgtggaatggaacaaaaaagaggagcttgtagcagagcaagccatcaagcacttgaagcaatacagccctctacttgctgcctttactactcaaggtcagtctgagctgactctgttactgaagattcaggagtattgctatgacaacattcatttcatgaaagccttccagaaaatagtggtgcttttttataaagctgaagtcctgagcgaggagcccattttgaagtggtataaagatgcacatgttgcaaaggggaagagtgttttccttgagcaaatgaaaaagtttgtagaatggctcaaaaatgctgaagaagaatctgaatctgaagctgaagaangtgactgaattttgaaactacaccctcagtaaagcaaacaggagttgtagataaaatgtcatgtctcatgtgtcctggttcttacatcttctaccttcctgtatcaagcatgatataagggctttcatggcaaattttattttaactggttctatggntgctggaaatgttgggtttaagttctaaaaccatggtttaagtaactacaggagctatagatttgaatctaatggtgcattaagcctttcaagtatcttctaccttctggatttctactggaataatgnaaattaaggccttcccaatgnacaggttactttattcctgggttttataacagntta

SEQ ID NO: 131 - DNA, 792 bp, Homo sapiens
  misc_feature (5)..(6): n is a, c, g, or t
  misc_feature (8)..(8): n is a, c, g, or t
  misc_feature (501)..(501): n is a, c, g, or t
  misc_feature (540)..(540): n is a, c, g, or t
  misc_feature (605)..(605): n is a, c, g, or t
  misc_feature (608)..(608): n is a, c, g, or t
  misc_feature (638)..(638): n is a, c, g, or t
  misc_feature (641)..(641): n is a, c, g, or t
  misc_feature (644)..(644): n is a, c, g, or t
  misc_feature (675)..(675): n is a, c, g, or t
  misc_feature (705)..(705): n is a, c, g, or t
  misc_feature (710)..(710): n is a, c, g, or t
  misc_feature (712)..(712): n is a, c, g, or t
  misc_feature (729)..(729): n is a, c, g, or t
  misc_feature (737)..(737): n is a, c, g, or t
  misc_feature (781)..(781): n is a, c, g, or t
  misc_feature (792)..(792): n is a, c, g, or t
  nbla-03804-r1
tgganncnttaagtgtaagtatggactttatttttttaaaaaaaagtcttttgagaactacaaattacaaagtaaaagcagatcactacgtagaaatctagtgaatacattttgcctgtgcatgaaaaactttatcaaagttactcattttaacaaattcaccccattcacaacaatcagttataatgttctttttaaggttactatacctttatttcaaattatattacatgttattccctcaaaatgaacttttaaatgacaaacttttggctcataagaatggcaccttcaaaaggggcgatttccactcagtctctggtggcattattccaggctagtttcaccagttaaaaaccttcaaaatgttcacttttaacacaaagtcttcccataaaaaatgtggctacattttccccccaatgactacatacatagatgggtagcagcaagaaaagatgaaaatgaaaaggcagccattaaaataaatggatcaattgnatccaagaaatatttggctcatggcaattaaaaaacggnaactagggtatggtaatagccagaagcttgagtcattactgagtatattaagagaaccgaagccngtncagtatgcccgagtaggaatatataattgncantgnccttcatttggtatagcaaatacttttaagnccattgggaatctaagctttatctaaattnccaantngaacatgctggcccttnacaatttnaacaatttttactggggttaagacattaagcattttctttactnaaactccatan

SEQ ID NO: 132 - DNA, 1230 bp, Homo sapiens
  nbla-03831
cactgttggcctactggctttttttcagcccaggggccggcgcacgaaacctgtttggaggttatggatgataaacccaatcctgaagccctaagtgacagttcagagcgtcttttctcctttggcgtcatcgcagatgttcaatttgcagacttagaagatggctttaatttccaaggaaccaggcggcgatactacagacatagtcttcttcacttacagggtgccattgaagactggaataatgaaagcagcatgccctgttgtgtccttcagcttggagatatcatcgatggatataatgcacagtataatgcatccaaaaagtccctagaacttgttatggacatgttcaagaggcttaaagttccagttcatcatacatggggaaaccatgaattctataacttcagtagagagtatttaacacactctaaacttaacactaagtttctagaagatcagattgtacatcatcctgagaccatgccttcagaagattattatgcttatcattttgtaccattccctaaattccggttcattttacttgatgcatatgacttgagtgtcttgggcgtggatcagtcttctccaaaatacgagcagtgtatgaagatattgagggagcacaatccaaatacggaactgaatagtcctcaaggactttctgagccccagtttgtccagtttaatggaggattcagccaagaacagctaaactggttgaatgaagtgctaacattctctgacacaaaccaagaaaaggtggtgattgtgagccatcttcccatttacccggacgcctctgacaatgtgtgcctggcctggaactacagagatgccctggcagtcatttggtctcatgagtgtgtggtgtgtttctttgctggtcacacccatgatggtggctactctgaggatccttttggtgtataccacgtcaacctagaaggagttattgaaacagctccagacagccaagcctttggcacagttcatgtctatcctgacaaaatgatgttgaaagggagaggcagagttccagatagaattatgaattacaagaaagaaagagccttccattgttagtctaatttattttaacttgatagaaaatgagctttgtgtttgtccctcctaaacaaaaaaataaaaatcctctgtctcattgtttagtaaaaaaaaaaaaaaaaaaaaaaaaaaaggccacatgtgctcgagctgcag

SEQ ID NO: 133 - DNA, 2376 bp, Homo sapiens
  nbla-03862
cactgttggcctactggcttcacaatattctttatttctctgtctctgtctctctctctcaagtcagagtgtacaacagtaagcaaagtttggcctctgttctcgcgtgaaatcaagttaacatgctccacctgttgatatgtttgtaagagaaatctcatgtatatgcacatatgcagaatttctgctctttgcttctcaggaaatctcttttctccaatgtaggaagaacacattaaaatgaataagtcatgttatttttagaaaacagaaaagcaaataaatgtgtgaatagaatatgcactgtttctgtgcttgaaacattgaacattgaatattgattgaaaggccaccatgaactttgaaagaccactgtgttcagagaactgtgatagaaactaaaagagtataaaaagatgtgatactttcatttttgagaggtttacagtgggatgcagaaaaaaagaaacctgtaaatgtgaatggcagtgtgtttggttagtgcctactggctatataaaattgcttttggatgtgtttcatgattccttataaaacgaagacttaataagtttacttggcagctgatgggcaaagttttaaaaaaaatcaaatgagttttttgttttcctttaagcagttcctggcaatgctttctttttttttatttcaaacagatgagtttttaaaacaatgattgcatttagaaccttcaagaaggcttgttaaccatggatttgatgagccgggtcctgagatctgaactgggagctagcttggtgcacacatggcagggccaaggaggtcttggatttccatgtaagggatacacagacaaataaacgtgataagggcaaacgttagccttgcaccctttgagtagcaaatcacagcgtatattgtgtagtccatgaagactggtgtcatccatcccagggcctgggtactgtgtacagggtgagcaatgacttagatggagaaaatatttatcatttgttttgatcactttttcattgcaaccacatttcctaaggaaatgggtataccagttcaaatatttgctcttcatttcatgctgcttggcagtctttgcatcctttgctctctgacttgttcgcctggctgtgcagtctgtttcccaagagtgctcttgatgagatattttgtttttatcaggaaattgatttcttgcatctttttctgagattactgaatccaatattggagtagaatgactcaattcttggaaaaatgtctaatttgggactctggtggttgatttttattttccagaggttcaaagccgaatttgagcatgttggtgggagaggcagaggagatgccttgcggcccacctggttcttccttgcatgaagctctcatcctcctccagcagtgtgcctcatcacactgggctctgggtgtatcttgcttccactggagagagcatcctgctccagtgtagctttccactgtttccctagttctaaatcttgactgaggtttcttggtcttattctttaattccttaagcatcctggcagttccttactgggctgtctgcctttacaattgtgcgttgttgcatttttggtgagattagcctaaattcaccactcttccttggtgtcgagaggtggcttagtgccctaagctttgggttaataaaggctggactcttgagtccaggactagcacagctgtctgtactctgtgtcttcccataagagatgcaccaagcagttttattatgtgtaagggcctttgccatgatacttttgagaagggcgatgtgtatatttatatttcaccttgatgttttattcatgactgatacttgtttagtctatgatggcagtagggagtaggaaagcagtctgtgtgtctgagtctggttcatttaggtcttaaactcagaactggtttaatgcagcacgtgtatgtagttattataaacaatgatggcaggaatgcacaattttctgcaattaaaatgcccagtatattcaattcactggattttaccctgtgaccactgtgctgtttctctctatgtgaagaaatatactcaattaagtgttgcataatgtgagctttgtcagtccaaaaaattttttcaagttgcttgtggtgtcattggtatttattctgcaacgtcagcagtgcttgcgggccaaatgcagagtgcaggctgtggttgaagcaacttttttttgttgttgttcacattccaacattcttaagaactgcctgaaaagaaatgttggaactgctttctaaaagtacttttcagagccgtgcactattggagaagttaagaaccttacagttccgaaaaaaaaaaaaaaaaaaaggccacatgtgctcgagctgcag

SEQ ID NO: 134 - DNA, 2145 bp, Homo sapiens
  nbla-03898
cactgttggcctactggaattattcagttgcggagacctgtttgagaaaaaaaactctttgtcttctttaatcaagtgttgtattgtctgtggcactgttttaaatgaaagacaattaaattgctttgctgttttatacattgttgtctttaatcactagtctaaactctatgtttttatgaaagcatctttaaattttttttcttagctgttctttcttgtttgtggtataacctttctgtaccatcttttggttctgtggaaatgcccttaataacacataggattaggactaaattttggagatgggtaagtttgagcaaagagtcagtcaacacaggggaggatttttgaaattttatctctaaaaacagttttccaattcagagtttttaaaacccttttaaaaatatagttagttttcagtggtttcttttacttttagtgtttttacacttggaagtcagatatctaaaaatagggaatgttcttttgctatttttagatctctactaaaatgtaatctgtagtgttttcttgtttcagagcatatcttaaaagattcagacaagtggcatttggggacctcttccccatccactggctttcactcaaaggaaaataagacttcttggttctggcagatactgtctctggcagaattggtctcactgttttccttggggagcattttaggtagtatgttgaaagacagatatacatcagttgaagacaggatcagatgctatctggttaataaagcttatgatcagggaaggggcaaagaagacagataccactaccattttgttctttctggttttactaatatgaccataatgagtcattttttatgcatataggctatgtgtttcaggttgcctttccttttcctcctacagatctattgagctttgtgttctaaacaagatagtgtgcttatctgaatgtttcccatctgtctttgatgaaaaagctcccagttaaactaatttggatttatttatttttcctgtctattccagttctctgctatgtgtgggcaagtgcctgttttatcttgaggggtagattttagcatttgaactctctccctttttaaaatcaccttgttacttacagatcatctcagtccagtaacttttctttataaaggttaaaagattgtttgctttcttctcaggtagtctcagtgttctcagccttgagagggaaagggacatacttaatattttcttgtcttgcttgctaagagctgtttttccttcgtcatgtgttgggcagggctagccacccatctgttggaccagctacttcataaaactttcaaaggatgatagtaggtgaaatgaaattgacaagagtgttggatgcaggtagaatgaagggtctgctgtagcgtgtatgtggacttctttcttttgtttatgttcgtaaaagtggagagactctggatatagaaagggtaatagcaaactgatatctccagtacctgtctcctatatgatcaaaaacattaacaatgtgttggttttgtaaaattgctactgttttgttctgaagtgctgtagccattagctggattgtaacagtaatatgacagctgtatagtaaaatactgtctctctttatgataggaaatgaaaaagcatctgttatgaagcctcagtgaactaaaagccattctctgaaaagtcaagacttttgggctttatcagtagataaacatgagccataggttttctagcaatagaatattttaacctatatgaatatatgctttataggtgagactgctatttaatgagagttttaaagtaactaaaccttgttgacagaattcaggatggaaagttttaccctaaataaaacttcaggatattgaatatgatagcaaagttccagggtatgttttatatttatgaacaattttcatttgaatatttggagcttgggggttttggtgagacatgttcatgtatgttatatacaaactttcgggcctggcatgtggctcacacctgtaatcccaacacttcaggaggctgaggcgggaggatcgcttaagcccaagagttcaagacccatctctacaaaaaattaaaaaaaaaaaaaaaaaaaaaaaaggccacatgtgctcgagct

SEQ ID NO: 135 - DNA, 2592 bp, Homo sapiens
  nbla-03914
cactgttggcctactggatcgtataaaatcttatgtggaagccaaacattaaactggtaaaaatcatttcaggttgagggtgtatgttggtgggtacgaagtggtttcagagcttccctctcagttttcccagtgttccccaaagactcctaggacacctcgggggagctcaggggacccaatgcagcacaactagaggccccagcctccacactgcctggtgggggggtctagactgaatcgtgaaatcaccctatctatgggctgtgtgtccagttgttggggtgaggtctggggagtgggggatgcaagtggtggagggaatgaaaggagggagggaaacttccagtgcctcatcattcaccctccccatagatggcacctgggctccccggggctgggtcaggctctgagtgacagccattgaagagaagccagcctccaggaaatttctccagcatgactgggcatcctctctcctagccaaatatatcagagctttgaggaaaatgggcttctggccaggccacactcgtccttaggaagagctgtttccatctgaggaatctttttgtagacaggtgctggtccttgaagggtaggtccgctgagcttgcgccatagaatgcctacaccactggcatcctttagtcctgctgaggggagggactaactcctggtaattttcgttttgttgatcaataaaggttgttgtattggcaagtgccacctgcatcactactacagattcttagggacctaccctcacatgtgaatctcgggttacattttgcaaagccctttcacatattttgcaaagcattttgacacatttttcacatattccacatattttgcaaagccctttcactgtatttcgatgcacacccacctgagatgcaggtgctgagagtcttactttacagataaggaatcaggttaaagaggttccctgactcaggcaaggtcacaaaactggttagtgccagagtggagacccagcaatcaactcttctcattccaagccggacggcatctcgccatgccacaggggccttctggtggtatagctggtgactgaggacagaagagaagtaagacaatggcagactcttaatttctagcaggttctctgcagctcccccctgaatctcccctaatattcccacttacctcctcacccttccctggtgagacagagcaggactcttccagagcagatttccattgttatttttcgcgtctcagcaccacgtgtattgctatttttatcctgtactagaaactattaagtggggagaaatgttaattggtattattacagcaaactgtgtcctagtaacattgcaattcagaggtaagctctccactcccctcccctgccttttaggcaaacataggaattttattcattttgctgacagccagccctggtttcctaggctggtgtggggagaagtacttgggaccctgagatgtattggacaggctcctgggcctctgctctgtggctagtttatgaaggaaggaagttggggtgggtggaatagcgatgaatttagttctgttttatccactgatgctggactggaaggaataagatgtctgctcaggaagcccttgtgaggggtggcttgcagcatctttgtgaaagaatcaggggcatgtggattcatagtccagctgaaagtaagagacagtggccctcatggtgtgtccccgtaagccagagggaagaatgagcagattaaaaaataatagcagtgaagtccacacaagttctgcctaacttccagaaggaaggggacacattattattagggattcaacaaacgggctggtttctaaccctggcagcttgccttcccatctatgtaaccttaagcaagtctcttatcctctctggcatcaatttcctcatctgtcaaatgggctaaaaatacttacatctctgggttgttgtgagaataaagtacattgcacaaagcacacagtaagggctctggaaattaaagcttaatagtgattttttttcctcatgtgctctaagaatactgagggctgagtgtgcactggtagatggaaaatccagtttccaacccagcagcatccactgactgatcaaacctaacctgtgctggataataccttccaaatcctctctggcccttcctcctcccctgggaagaacaatcagcttggtttcatggtaccctacaatttttattttttataatgttgattgtttttaagaattattacaggctgggcgcgatggctcacgcctgtaatcctagcactttgagaggctgaaggggggtggatcacttgaggtcagaagttagagaccaacctggccaacatggtgaaaccccgtttctactaaaaatatagaagttagctgggcacggtgttgtgtgcctgtaatctcagctactcgggaggctgaggcaggagaatcacttgaacctgacaggcggaggttgcagtgagccaagattgcaccattgtactccagcctgggtggaaagagcaaaactcggtccccctcacaaaaaaaaaaaaaaaaggccacatgtgctcgagctgcag

SEQ ID NO: 136 - DNA, 754 bp, Homo sapiens
  misc_feature (550)..(550): n is a, c, g, or t
  misc_feature (610)..(610): n is a, c, g, or t
  misc_feature (645)..(645): n is a, c, g, or t
  misc_feature (650)..(650): n is a, c, g, or t
  misc_feature (671)..(671): n is a, c, g, or t
  misc_feature (678)..(678): n is a, c, g, or t
  misc_feature (690)..(690): n is a, c, g, or t
  misc_feature (695)..(695): n is a, c, g, or t
  misc_feature (738)..(738): n is a, c, g, or t
  misc_feature (754)..(754): n is a, c, g, or t
  nbla-03932-f
gcactgttggcccggtgaaagccttcgaggtgacatttttcaaaaatttatggaaagtgacaagttcactagattttgtcagtggaaaaacgttgaattaaatatccatttgaccatgaatgagttcagtgtgcataggattattggacgaggaggattcggggaagtttatggttgcaggaaagcagacactggaaaaatctcacaggaagtaaaagagcacagctttttcaaaggtgttgactggcagcatgtctacttacaaaagtacccaccacccttgattcctccccggggagaagtcaatgctgctgatgcctttgatattggctcatttgatgaagaggataccaaagggattaagctacttgattgcgaccaagaactctacaagaacttccctttggtcatctctgaacgctggcagcaagaagtaacggaaacagtttatgaagcagtaaatgcagacacagataaaatcgaggccaggaagagagctaaaaataagcaacttggccacgaagaagattacgctctggggaaggactgnattatgcacgggtacatgctgaaactgggaaacccatttctgactcaatggcagcgtcgntatttttacctctttccaaatagacttgaatgganagganaaggaaaagtcccggcaaaanttactgncaatgggaccanatctntctggggaagaaactcaaattaaggccaaaatgcctttgtcanaataaaaggggggaan

SEQ ID NO: 137 - DNA, 759 bp, Homo sapiens
  misc_feature (6)..(8): n is a, c, g, or t
  misc_feature (495)..(495): n is a, c, g, or t
  misc_feature (544)..(544): n is a, c, g, or t
  misc_feature (553)..(553): n is a, c, g, or t
  misc_feature (624)..(624): n is a, c, g, or t
  misc_feature (643)..(643): n is a, c, g, or t
  misc_feature (666)..(666): n is a, c, g, or t
  misc_feature (687)..(687): n is a, c, g, or t
  misc_feature (697)..(697): n is a, c, g, or t
  misc_feature (700)..(700): n is a, c, g, or t
  misc_feature (709)..(709): n is a, c, g, or t
  misc_feature (711)..(711): n is a, c, g, or t
  misc_feature (721)..(721): n is a, c, g, or t
  misc_feature (731)..(731): n is a, c, g, or t
  misc_feature (734)..(734): n is a, c, g, or t
  misc_feature (736)..(737): n is a, c, g, or t
  misc_feature (745)..(745): n is a, c, g, or t
  misc_feature (759)..(759): n is a, c, g, or t
  nbla-03932-r1
tttttnnnttttaagactgatgacatgggggatttcgctggttctcataacccagcatctatttgggggtatcagtggggcctggaggcagtgggagaaaacaaacttcacagggcagatgctgctgggaccaggaaaaaggcttcatgccctaaggtcctcactgtcgtacagcccagtgcaaagtatcattcattcatgacagatgcatgacgacatgaaagtcaatatacacagttaacccattttgacacattcattcctcagcattttttcaatacaattcatctgaaattatactaagacataaaacagacctgcttttgtacatccattactgatatgtctcccagggtcaggcagaaggaaccagaatgactgtcacacaactgctaattgtcgagacctgagacggactcacccatgagtgctcctgcatgccaggtactgcttgtcgactcgtgcacactggactcaaagacttttgaaaactgntcttgccctgaaacctaaaacttcacggcctgtccttcagaatcactgnaaatctttncaatgatggacggatgaatgccttcaatgattaagttaatcccatacacttggataggaccgtgtccgcanttccacctgctgaaggggncccggacaaactggcaaaagcanggcacgcatcgtggtgccggntccaaagganggnccaagtgcnanaaatatcttnaacttttacntcntnngaaaatanccttaactttaacn

SEQ ID NO: 138 - DNA, 756 bp, Homo sapiens
  misc_feature (619)..(619): n is a, c, g, or t
  misc_feature (659)..(659): n is a, c, g, or t
  misc_feature (674)..(674): n is a, c, g, or t
  misc_feature (677)..(677): n is a, c, g, or t
  misc_feature (743)..(743): n is a, c, g, or t
  misc_feature (753)..(753): n is a, c, g, or t
  misc_feature (756)..(756): n is a, c, g, or t
  nbla-03949-f
cactgttggcctactggaccctaattgagggagtgaggaagagagcagctcgcttctaactggactgcacgttggtgacagcgtcccaagctggtgacagacccactctgtaactttcagctagattcagccaccagatcccagaaacatgacccttgctgcctacaaagagaagatgaaggagctcccgctggtgtccttgttctgctcctgcttcctggccgatcccctgaataagtcgtcctacaaatatgaagcagacacggtggacctgaattggtgcgtcatttccgacatggaagtcatcgagctgaacaaatgcacctcgggccaatcctttgaagtcatcctgaagccaccctcctttgatggggttcccgagttcaacgcctccctgccaaggcggcgagacccatccctggaagagatccagaagaaactagaagcggctgaggagcgaaggaagtaccaggaagcggagctcctgaaacacctagcagagaaacgggaacatgagagagaggtgatccaaaaggccattgaggaaaacaacaacttcatcaagatggctaaggaaaaactggcccagaagatggaatccaacaaggagaacagggangcccaccttggccggcatgttggaacggttgcaagagaangacaagcacgccgangangtgccggaaaaacaaggactgaaggaagaagccttcaggtaaagcctagaggccaagaactttcangtaagccggncan

SEQ ID NO: 139 - DNA, 761 bp, Homo sapiens
  misc_feature (523)..(523): n is a, c, g, or t
  misc_feature (563)..(563): n is a, c, g, or t
  misc_feature (617)..(617): n is a, c, g, or t
  misc_feature (619)..(619): n is a, c, g, or t
  misc_feature (693)..(693): n is a, c, g, or t
  misc_feature (720)..(720): n is a, c, g, or t
  misc_feature (730)..(730): n is a, c, g, or t
  misc_feature (737)..(737): n is a, c, g, or t
  misc_feature (740)..(740): n is a, c, g, or t
  misc_feature (748)..(748): n is a, c, g, or t
  misc_feature (752)..(752): n is a, c, g, or t
  nbla-03949-r1
tttttttttttttttataccaaagggtttatttgcaaagctgtaaaaaactacacagtgtgcagagcagagtgggaagaggtcctgggacccggttaacacaggcagcccctgcactcatgtttgcaggggaagggaggaggagagcttcttttccagccatggttcagtgtcctggagaccaagactgctgggtctggatgcctcctttgccttctactagcaaacactttatttccttgctcgtattttctaatctacctagaatctcaaacccccaaagcatggaggacttctgctatggtgtgaatgttgctgtctcccccaatatacaggttgaatcctaatcccgacactacagaattaagagatagggccttaagaggtgagatcatgaggactccaccttcatgaatgggattagtgccttaaagaaaaggctcaaggaagcccttttgccttcccttctgccatgtgaggatgcagcaaaaaggcatcatctttgaagcagatggcaagccctnaccagacactgaatctgctggcaccttgatattggacttnccagccttcaaaactgtgagcaatcaatttctggtatcaattacttaatctaangnattttggtacagcagtctgaacggttgtgactaagacaaattctttcttacaggcatcttggggaccatattanggatgtcaggtcattcgcaagggaacnccgcgtttcnttttctnatnaaatttanggcntgctatcct

SEQ ID NO: 140 - DNA, 693 bp, Homo sapiens
  nbla-04021
cactgttggcctactggattaatttactcgcagttgctgctgctcaggaagagagacaaggaatattttaacagaatcaaggcatagaagaatcaccattttatttgagcctctaatcagagtcagaccagtagagaaattaaataagattagaaaactctgtactgaaagctgctgatgcttcaaaaatgaaaacaagatctcacaactctccctgttagttgaaaatatatcaatttgctctgaaaggattcagctgcctagtgttgccattactaacataaacatatggctcatatttccatccagagaaattaatgctaaattggtgcctcgctaacatcagatacactgtattatgcttaaatatattcagtaaaatgtggaaaggggtattaacaacgacaacaaaaagatggattttttttttctcacaatcacagttgctaatccagtgggagatgtttgagagagttttgttcaacatcacagtgagagtgcctagggaaatcagaaaattacaatggattcccctttgattgtaataagtgttgattttctccatgagttgtttatcctgtctagtgatttgatggtgaacttttctaaataaatagccctttcccctccggtgtcggtaaaaaaaaaaaaaaaaaaaaaaaaaaaaaaaggccacatgtgctcgagctgcag

SEQ ID NO: 141 - DNA, 2851 bp, Homo sapiens
  nbla-04055
cactgttggcctactggcagatgaactaggtcagatcccttggaaagattgaatatagaattttaatggcatcaaatagttctgtccttccatattagacaattatatttcaaccgaagtcacattttggagaagactctataccagaatcttagtaagagctttttattctctgtgtagtagtaggatagctttttgggggtgttttcctggtttttccaaattgctacaattttaacaattatgatcatgaatagcaaaaagaaagaaaacatcactcagaagtgaagaaaagcgcttggtcagacacaaaagcccagtcacaaaggttaaaataaccatcattttgtgagcctttttacaatgcactagacaccgtgaggtgtgcatcatctccatccctcacagcagcactgaagggtagatgatattattcccagcatcctattgctatccagagggaaaggaggcttagccaacgggctgcaaacattccaattccttttcctgagatggacgcatgaactctcttggcccaaaggcattaaatattccgcccatgtaaccgatgccccttcttggaattcagagctcaccctgcaacctgctggttatcatttggcttctatcacaggctgccaacggtgagagtacacatgggtcacgctcatgtaaatattccagaccatatggcagttgtatttctcactgtaaatgaacacattggctttgttctatagaaaatcaatttcgcaaaaacttgagttcagttacttttggactggaaggataaaaatttcctaagccttcactgattgctgaaccttctataccaagtctacatgagttccacatccctgaatgctctctttcagttgattcgcttgctttactaatccaaggactcaaacattcacacagctgtatatggagaaaatataaaaacaattcacctttttggcaactgagctacgtaaccaataaaggtggtttcacttcaggccattacccagattagttttactaaacttagctggaatgccatcctgcgcctttgaggaatgtgcacaatatgctttggtactggcattgctaccactgtaattctctcacacaaatagaggcactacagtcgtaatattattccagtgaaaaactggacctctctctccctgggataccacaaagctaacaatggcaaagcctcccaaaaccaaagtgcacagaagaagacagtgcttaagctaattaaatctgctgtggaaccaggagaattccaagaacagcagtaacacatttttattttataaaaatgtccccattgaaacaacagatctgaatgcaaatgtaaaactaagcattcgataatgctcactttcacatctgtcaacattttagagtaacttcaagaggaatacatttgtggttctagaaattcttagtttatgcatagaatacatttgagaggactttgttttcacaagtatccaggtatcaaataaaaaaataccatggaatcacacacttttgaagctggaagggatcatgagagtcatgtatacctgcccctcatttaacaggtgtgatgaaagttcagagaggttcagttatcgctcaagattactcacatgactggatttcaggaaatttgaaggcaaaaaataaattagggatagatttccctctgtacccttagcatttaaatggcaaatctctcagtctgagatagagggctaacccagaccaagattcactggtcacctgacctttctgtatttttacaaacaaaattaaatggagaattgaaacatttgcccaaattgctttggataatttactgagctttgtttaccttaaaaaaaaatgaaatagagtagaataaaaagggtgacacatcttacagtatttgaatattaataaaatcatatttgatgttaaatttactgtttttattcttacgtgagtatatttcatgacacttttcatgtttcagttataactatatgtgtgtatatatatgtatgtgtctgtatgtatatatattagatatatgctaagttataatatataactttttcttaccatgaatcacagtaaaaaagaccaaaattcacttcagtggaaatttcacttttgccccactcaccatctttaaaaacaaaaaaccaacaatgaaaataaaatgtaaaatagaagcttctcataacattttgggggaaccttgcattaaactatcactttcttgtcactgcagcccaaaatgttctttctccttcaggcctagtgcaatgtcctataggttactaaaaaagaaacattaaacttaagaaactagaaagagggcaaatgcacaaaagatgaaaaaggaaacagatcttcctttcgttgttttaagatacatgtttttttctttcctaatatcaaagtttggggtaaacaacaaatgtaatttgctcagttcctaggacagtagatgtacaataatacgtgttaaaggaacaccaaaataagggtaaaacagcagactttagactctgctactaacctgtacaaaacttggtggagtttataatttctctgagcttcaactttctcaaccgtaaaaggtgatgactgggcaagagctgcatttctttcagggatctttgcagaactctttccatgggctcttaataaatgacccatgaaaatcatttctaaatgataggttaatagtgggcccttcaccgatttctaccttcttatgtattcatgatcatccaatgagtcctaactttccagctcagaaatggtgacctccaaagaaaaagaaaaaaaaaaaaaaaaaaggccacatgtgctcgagctgcag

SEQ ID NO: 142 - DNA, 2157 bp, Homo sapiens
  nbla-04072
gaattcctcgagcactgttggcctactggcttgataatccccctgattcccagactccttggaatagctccacagctatcagtggttctgccacaggttcagagccttcccagtactgccttcttatttgagaggtgtgctaagagctataaagcagaggcttcaattgtacacagtttggaagtttaggcaaaagtcatttcttccctatattttgtcatgcttatctcctgtctctttctgttttacagattagcaataaactccttaaaacccaaaggtttgggcctctgttcctttcacttgcagtcagacatggagttagtggtagaagaaacagaaggggtaacctgcatggtgacagctactgaggggatggataggaaagcaggctgagtccctggggccagtggttaccaaagccaaggagagagcaaggggagcccagtgggcctggccatggactgctctggaattccgagtgtgaactttcagccaagaaggtagtgtgaaaatattactgtgaggttttaaaagtacacaaataacaattgttttttgtaaaaagaaaaaaaaaaagttagaaaaagagatatgccaaaaagaagaaagtaaaaaatacacgacttctgtcttctgttaacatattaaaatttattcttttagatttttatgtgtctatatacatgtaaaatatatatgcatccccaaattgtattatactcttttgagacctcacatttttttcacccaagaatataacattaatttctttcctttagaaaagacatgagactaaagaatgtttattgagttgagagtttcccaatcaaggagtatgactctgtataataataaatctaatgttttattagaaattataataaaattagaaatttaatatttggcaggatgtgagttgcctgcatatgtacaccctttattatatgactagacactcttttgtgtggtcatggatatattggcatcttttgaagtgtatcctttttgtttcaggagcttctgtctagatgaatagcaaatgtgacactgataatagtaatcgaatattcctccaagtacaggctccttcctctttctcctggacctttgcacatgctgcctggaaaactcacccacaacctactttccatcctctccttcggctcatccctgctcagccctctttgttgagatatttgccaagccagattctctgagaagcctttcctggcatcttcgtctatataattctgctagttgtttctaaaactatgttgttagtgtatattgtaatcacctatttatgtctgtttgactgtgagcctcttggagatgggaattctctcctatgcattgcggtttccccaggccctagcacactgtctagcccagtattccttctcagtaagtaggtgttgaatgacttacaaaatgaatgctaaaagacctggtagacaagaaggaatttcttagcctaagtgaccagatgtggagaagatactcaaacacttcagggtccccgatctggtgatgtcacttgcagtggaatttcatatgaatccagtgtgacagaagttgcctagtcaagttgtaagtcctcttctctgggtcacatgttcaaatacttttaggagacagataatgcaatatttaagatacaggaagtgatgaagactgtggcacactggagagtttggactccaagagtaattaattcagttgaaaaaatcaacagcactctgttgatcaagcaaactttctaggggccctaatccacctgggcctgcagtatgtaattccataactcatgggatgccatcaagagagacaatctacttgattgctaaagggcctttgttttctttggagttccccaggaaggagaaatgtatgtgtgtgcaagggtgaggaggggggagagtgaagaaacaatactatccccttaaaaaggtttgtcagttttcattatgaaagaagaccaaacgtgcccactccagaaatcttggcatatgcagttattttgaagccattcagcgttcttcaagatgtcacaatgaaaagagtgatggttttttaaataaaaaattaacatgtttctcttggcaaaaaaaaaaaaaaaggccacatgtgctcgagctgcaggtcgcggccgct

SEQ ID NO: 143 - DNA, 2579 bp, Homo sapiens
  nbla-04099
gaattcctcgagcactgttggcctactggaagttagaagaaaacaatcacaaaactgaagcctaagagagaaactgtcctagttgtccagagataaaaatcatatagaccaattgaagcatgaacgtggattgtatttaagacataaacaaagacattgacagcaattcatggttcaagtattaagcagttcattctaccaagctgtcacaggttttcagagaattatctcaagtaaaacaaatgaaatttaattacaaacaataagaacaagttttggcagccatgataataggtcatatgttgtgtttggttcaattttttttccgtaaatgtctgcactgaggatttctttttggtttgccttttatgtaaattttttacgtagctatttttatacactgtaagctttgttctgggagttgctgttaatctgatgtataatgtaatgtttttatttcaattgtttatatggataatctgagcaggtacatttctgattctgattgctatcagcaatgccccaaactttctcataagcacctaaaacccaaaggtggcagcttgtgaagattggggacactcatattgccctaattaaaaactgtgatttttatcacaagggaggggaggccgagagtcagactgatagacaccataggagccgactctttgatatgccaccagcgaactctcagaaataaatcacagatgcatatagacacacatacataatggtactcccaaactgacaattttacctattctgaaaaagacataaaacagaatttggtagcacttacctctacagacacctgctaataaattattttctgtcaaaagaaaaaacacaagcatgtgtgagagacagtttggaaaaatcatggtcaacattcccattttcatagatcacaatgtaaatcactataattacaaattggtgttaaatcctttgggttatccactgccttaaaattatacctatttcatgtttaaaaagatatcaatcagaattggagtttttaacagtggtcattatcaaagctgtgttattttccacagaatatagaatatatatttttttcgtgtgtgtttttgttaactaccctacagatattgaatgcaccttgagataatttagtgtttttaactgatacataatttatcaagcagtacatgaaagtgtaataataaaatgtctatgtatctttagttacattcaaatttgtaactttataaacatgttttatgcttgaggaaatttttaaggtggtagtataaatggaaactttttgaagtagaccagatatgggctacttgtgactagacttttaaactttgctctttcaagcagaagcctggtttctgggagaacactgcacagcgatttctttcccaggatttacacaactttaaagggaagataaatgaacatcagatttctaggtatagaactatgttattgaaaggaaagggaaaactggtgtttgtttcttagactcatgaaataaaaaattatgaaggcaatgaaaaataaattgaaaattaaagtcagatgagaataggaataatactttgccacttctgcattatttagaaacatacgttattgtacatttgtaaaccatttactgtctgggcaatagtgactccgtttaataaaagcttccgtagtgcattggtatggattaaatgcataaaatattcttagactcgatgctgtataaaatattatgggaaaaaaagaaaatacgttattttgcctctaaacttttattgaagttttatttggcaggaaaaaaaattgaatcttggtcaacatttaaaccaaagtaaaaggggaaaaaccaaagttatttgttttgcatggctaagccattctgttatctctgtaaatactgtgatttcttttttattttctctttagaattttgttaaagaaattctaaaatttttaaacacctgctctccacaataaatcacaaacactaaaataaaattacttccatataaatattattttctcttttggtgtgggagatcaaaggtttaaagtctaacttctaagatatatttgcagaaagaagcaacatgacaatagagagagttatgctacaattatttcttggtttccacttgcaatggttaattaagtccaaaaacagctgtcagaacctcgagagcagaacatgagaaactcagagctctggaccgaaagcagaaagtttgccgggaaaaaaaaagacaacattattaccatcgattcagtgcttggataaagaggaaagcttacttgtttaatggcagccacatgcacgaagatgctaagaagaaaaagaattccaaatcctcaacttttgaggtttcggctctccaatttaactctttggcaacaggaaacaggttttgcaagttcaaggttcactccctatatgtgattataggaattgtttgtggaaatggattaacatacccgtctatgcctaaaagataataaaactgaaatatgtcttcacaggaaaaaaaaaaaaaaaaaaaaggccacatgtgctcgagctgcaggtcgcggccgctagacta

SEQ ID NO: 144 - DNA, 728 bp, Homo sapiens
  misc_feature (674)..(674): n is a, c, g, or t
  nbla-04106-f
cactgttggcctactggtttatgtcatgtttagaattgtgtgtgatagaggctgtacatacacgttttacaggaagcgcctggcactgtgtgaggctggcggttgaatggtcaggagtgtagtagcggctctaagccagcctcacagccctttctcatttctcgctccatccccctccccgttcatttccaggcctttccacgaagagtcctcagccttctccctccagccggaagagccccctgagtctgagccctgcatttcaggtgcctttgggcccagctgaacagggctcatccccactcctgagccctgtcctcagtgatgctggcggagccgggatggactgcgaggagcccagacacaaggtgggaccctcgaggctgagaagctagcagagggttgcagggtgggcctgttttcactgttccttcgggtggtgctggtggggaccctggggcggggcagggaagggctctgcactcacagccgcttaccagcctcctgagcagagaggaggtactgggccgccttcctagcaaaaccttctgagactttcctcttatctctgggactccaggttccttcgtacaaaaacgaagtttccttattcatttagcaaacggtccctggaacccacaggcttcatgtgtcaagctggatctttcagcctncccactcttccttccttccttccaccttcttcatttctccttccttcctcctcc

SEQ ID NO: 145 - DNA, 746 bp, Homo sapiens
  misc_feature (1)..(1): n is a, c, g, or t
  misc_feature (6)..(6): n is a, c, g, or t
  misc_feature (29)..(29): n is a, c, g, or t
  misc_feature (116)..(116): n is a, c, g, or t
  misc_feature (434)..(434): n is a, c, g, or t
  misc_feature (444)..(444): n is a, c, g, or t
  misc_feature (460)..(460): n is a, c, g, or t
  misc_feature (462)..(462): n is a, c, g, or t
  misc_feature (472)..(472): n is a, c, g, or t
  misc_feature (482)..(483): n is a, c, g, or t
  misc_feature (485)..(485): n is a, c, g, or t
  misc_feature (487)..(487): n is a, c, g, or t
  misc_feature (493)..(493): n is a, c, g, or t
  misc_feature (500)..(500): n is a, c, g, or t
  misc_feature (513)..(513): n is a, c, g, or t
  misc_feature (531)..(531): n is a, c, g, or t
  misc_feature (537)..(537): n is a, c, g, or t
  misc_feature (540)..(540): n is a, c, g, or t
  misc_feature (543)..(543): n is a, c, g, or t
  misc_feature (546)..(546): n is a, c, g, or t
  misc_feature (550)..(550): n is a, c, g, or t
  misc_feature (553)..(554): n is a, c, g, or t
  misc_feature (561)..(561): n is a, c, g, or t
  misc_feature (563)..(563): n is a, c, g, or t
  misc_feature (565)..(565): n is a, c, g, or t
  misc_feature (568)..(568): n is a, c, g, or t
  misc_feature (573)..(574): n is a, c, g, or t
  misc_feature (578)..(578): n is a, c, g, or t
  misc_feature (580)..(580): n is a, c, g, or t
  misc_feature (587)..(587): n is a, c, g, or t
  misc_feature (589)..(589): n is a, c, g, or t
  misc_feature (604)..(604): n is a, c, g, or t
  misc_feature (608)..(608): n is a, c, g, or t
  misc_feature (612)..(612): n is a, c, g, or t
  misc_feature (617)..(617): n is a, c, g, or t
  misc_feature (620)..(620): n is a, c, g, or t
  misc_feature (626)..(626): n is a, c, g, or t
  misc_feature (635)..(635): n is a, c, g, or t
  misc_feature (639)..(639): n is a, c, g, or t
  misc_feature (643)..(643): n is a, c, g, or t
  misc_feature (645)..(645): n is a, c, g, or t
  misc_feature (648)..(648): n is a, c, g, or t
  misc_feature (657)..(657): n is a, c, g, or t
  misc_feature (661)..(663): n is a, c, g, or t
  misc_feature (665)..(665): n is a, c, g, or t
  misc_feature (669)..(669): n is a, c, g, or t
  misc_feature (680)..(680): n is a, c, g, or t
  misc_feature (683)..(683): n is a, c, g, or t
  misc_feature (685)..(685): n is a, c, g, or t
  misc_feature (687)..(687): n is a, c, g, or t
  misc_feature (691)..(692): n is a, c, g, or t
  misc_feature (699)..(701): n is a, c, g, or t
  misc_feature (707)..(707): n is a, c, g, or t
  misc_feature (712)..(713): n is a, c, g, or t
  misc_feature (715)..(715): n is a, c, g, or t
  misc_feature (718)..(718): n is a, c, g, or t
  misc_feature (720)..(720): n is a, c, g, or t
  misc_feature (723)..(723): n is a, c, g, or t
  misc_feature (727)..(728): n is a, c, g, or t
  misc_feature (733)..(733): n is a, c, g, or t
  misc_feature (738)..(741): n is a, c, g, or t
  misc_feature (743)..(744): n is a, c, g, or t
  nbla-04106-r1
nttttnctttgacccaaagaaacagtganctaaagagattgtcattaggtttccaaaataaaataaaaagacatcttttttggaaacagtcttgctgccagggcccagaactagcnctcacttgcaggcctcgtgcagcagtacgtttaatatcctttgctgcctccagaccagggggctccttccactccagtgggatccagggggaccctcagggcaccaggaaggaggagactgccctgcctgagccatcctacctgctgagagtcccagcatcccacgggtagccctggcatctggaaggcaggccttggacagaatatcctctggccaattcgggccaaagcaggagtgctgaggtgtcacaatgacatacctccccctgtaccagcactgactccctccctcctagaggccccatggcctcttccatncagctgccantcagggaccccatgtntnccttctctgnggactttcanncncnatatantttacanacttccttggacnctgagtctttctttttanggtccntcngcnttnccgnatnntgcaggnananttncctgnncttngnatagtgnangccacctttgaggcncagnattncctgnctntggttntcctggttnttgnctgnangantctgtttgnttgnnncntttnttcttggttanttntntnttannccttatnnnttattntttgnntnttngnaancatnncgggncttcnnnntnntc

SEQ ID NO: 146 - DNA, 2378 bp, Homo sapiens
  nbla-04137
gaattcctcgagcactgttggcctactggaattaaccagcagagccagctggctgaaaagctgaagcaacagatgttggatcaggatgagcttttagcttccacaagaagagactatgagaagatacaggaggagctgacacgtctccagattgaaaatgaggcagccaaggatgaggtgaaagaagttctccaggccctggaggagctggctgtcaattatgaccagaaatcacaggaagtggaggataagacccgggccaatgagcagctgacagacgagctggcccagaaaacgactacatcgacaaccacacagagagagctgagccagctacaagagcttagcaaccaccagaagaaaagggcaactgagatcctgaatttgctgttgaaagatctgggggagataggtggaattattggcaccaatgatgtgaaaactttggcagatgtgaacggagtcattgaggaggagtttaccatggcccgcctgtacatcagcaagatgaagtcagaggtcaagtccctggtgaaccgcagcaaacagctcgagagcgcccagatggactccaacaggaagatgaatgccagcgagcgggagctggcagcctgccagctgctcatctcccagcacgaagccaagatcaagtctctgacagactacatgcagaacatggaacagaagaggaggcagctagaagagtcccaggactcgctcagcgaagagctggcaaagctccgagcccaggaaaaaatgcacgaagtcagcttccaggataaggagaaggaacatctgacgcggttgcaggatgctgaagaaatgaaggtgtgtgtggctgccccttccatcaagcccagtgtgcatttgatgcatttggattggaaatgcttgttctaggaaaatctgtcaccttcagatccgtatatggcaagggacaggggaggggctgttgttgggcattcagagtcgatctcagagtatagcctggcttagaaatgaacaagtccagaaaccccaagatgtctgtagagaatggttaagttgcgttaatacctttgtcttcaccattcctgatgaagagggaaagggtagcacccccaatcactgcatgggctcttttgtcggagttaacttctaaggatttcttcctccaacctttacgcagaacacaccaaatttgagtttctatctcaaacatagagatttttcttttggtcacattttaaactgtaaaggaaaattgattgtggagtaagacttttaggtgaataaaatgagacaggtgaagatgtaggattttgattagttgtaggcaaactatgagcctcattgagtcaaggtccacagttaaagacgtccacggcatgcccttgctccagccagcagaataaaatcatgcgtcgtgggagtccctttcctgttttcagagtgctgttgccaaaaggtctcctttggacatcatcataaatctgtgcagtgggcagggcaggggcttttatctcagttttacatgtgagggagtgcagctcacacaggttacaggcttatctggaggttacgtggatagggagaggttggtgccctctgactgacctggctggagaagctcaggctgggctgtaaaaggtcaagggaacactttttatttagttggtgggctaattggcttctagggccaacttggtttgataacagatcttgggttttgttatcccaataaagcaaggccgggtcctgggggcaaaacagccagaaatgcccccagttttgggatctgacatctgagggacacagggaaggaggtaggtccagatccagggcttgtcacagagtgggctgagtgccaacgagtagatgacatgtttctcttggcctgggatgcagaaggcgctggagcagcagatggagagccaccgggaagctcaccagaagcagctgtccagactccgagacgaaattgaggagaagcagaaaatcattgatgagattcgggagtgagtcggcccagggcaccaggggtgtgggggtggtcatgcctcggtcctcttggggaagcctggaaggatgtggctcttagtcgagggccctgctcaccttgccctgtgggcactgccctggtgacacagcaggctgggcgggctgcttccaaggtctgttctccgatctggagctgagcctcctggagccctggcatggcaggtggcaggcgggcccagctgcctctcctagtccccgggggccagggtcacataggtgattccgctggatggacgcatgccccagtagatgggggggagcatctgtaatgaaagcaccaaaaaaaaaaaaaaaaaaggccacatgtgctcgagctgcaggtcgcggccgctagacta

SEQ ID NO: 147 - DNA, 4684 bp, Homo sapiens
  nbla-04145
cactgtggccttttttttttttttttttcacaattcagaagaactttaatgcatataccatcattgccactataatagagatagaagatacattaagaaaattcagtttgtatcaataaaacagatcaacacagaacaaggaaacaccatagatatttgtaaatgagatcttctcttttgttactgtgtatatatattcctttatatttatacaaactcacaacacatgacatttcatatttcatatgccactgagaagaggtgtcagtatacagaacataggaagaagaaaaaagcatgagaacatctgcttagttagaatctgatgaggagagacgtgagagctattgttcctctctctgctcaggcctatcgagaggcaactgcagtttttgctaattgttcctcctgaggaattctgctcatactgctatggtacatctcctaggttggcatgagaccagcctggtccccagttgaataaattagaaagagcagttgggggaattgaatatgatatgcaaattgcataaggtgacatctctctgtgtggccacagagatagatcatctgctcctggctccttgatctgagggaagcctctgctgttcaacctgctccagggtttaattctgttggggttgtggggctgacaacaatgtgttcctttccttccttctctcccacaagcagaggaagtcatacgtagacaaaacagatgtttaggttttctcttcagcaggcttcctcttgttcccctctatcacccccagataggtgaagttcagaattaggactgcccactgcggggggaacagaccctcccctgttctgagactaaccctgccatttactgccttctctatgtagtcttggataggttgcttcactgatgcaggcctcagtcttcctcatctgtactggaaataataaaacccacatcacagtgttgtgtcaaagatcatcagggcatggatgggaaagtgctttgggaactgtaaagtgcctaacacatgatcgatgatttttgttataatatttgaatcacggtgcatacaaactctcctgcctgctcctcctgggccccagccccagccccatcacagctcactgctctgttcatccaggcccagcatgtagtggctgattcttcttggctgcttttagcctccagaagtttctctgaagccaaccaaacctctaggtgtaaggcatgctggccctggtatttctagatgaggttaggttcctgggacaggagtgtgtattgaggtggagggaaggagctgaaagaaggaggggatccttggaaagggctctgagaggggtgtattcgtttcattctgagacgactaccatctatccccctagactctcacagtggctccaccttaaatgtccacagcatttcactttctaaaatgtacttttatttgactctcataactattttgtgaagtagggaagattgtcagcctcattaggtgaaaatatgttggttcaagatcacacagttagtatgctgcaaagtcaggactcaaacccaggtctctggaatcctggttttctgaatgtcggagggcacctctaacaaaggctctggagcactctaaactctcattctgggctcattcctcactcctggaggctgatttctgggggaaggaggaagtgcatgaggtacctttctgtcacatgactggtggcagaccctactttaacccagcccaacaaggtcatgctacagagctgctcatggcattttcctggactctcctcccttggtcctgactggattcttctaccctgatccacttagtaagtccaagctccatctcctacttacacaatgccccttctcttgctcctttgctcatggtgtttacactggctttctccagtctctggttctcagtccccttacaaagatcctggattagatttgcctgcctagctctgcctgattgggattacacattgtgtagtgccaacatcacacgttcggcatctacggtgtgtgcacggcactgcactaagggttttacacccattctccatttaatcctttcaacagccttgtgaagtagatagtattacttcatttacatatgaagtaactgaggctcactgaggctccgggagtcatcttcccgaagtcacaaaactagtgatgaagacccaagaactgaacccaggtctgtcagactgtaagccctgtaggcttaactattctgccttatgaccttctgaaacctcatcctgtggtctgatgcctacaggggttggaagatagtttactacatgaaatcctttagtttccaggcttttagctgcatggcagagtttgtcctgagaaagatcttgcccagctcagcctggcacacacgggtccataaattaagtcctccttgaggtggaatgcatttctggcacataaacatggctgcctggtgtctcttttcaaacaaatgggactgtgctctattctcaacaagtgtcagagattcttgtttctcttcctcttgttactctttaggaacctccagcctagaatagtcaggcatggaccatccaaacacaaattgctaagatgctttctggcagcctcagaaaccaggaccatacgcctggctaagtgatgagggggtcacacagccttggctcttttcactgtacccgaaaagaaaggaagctttagtaatgaaaggattgctgccaaaatcctgtttcccccttgcagatcttacagaaaacagccacagaatcccaaggcatcagcaccaagagagcctgtagaaactatctggtctaagctcctgaagcccagagataagaatgacttaacccaagctgcacagcctcttaacagtccactgttaaccccagaaacagatgcatttgaatctgaaaggagacaggaatcctaatcctactgctcagggacttgctgatttactttgctgtctattagcctttctgtgacatgattttctaccaagcaaagtcttttattcaagtctcccagagatttcctatttaagcgtttgctatttggccacttaaaaaagacagaagagaagtaaacagaagcatataccacacaactcagtccagtcagtagttgactctcaagatggcggatgtcactgagatggctgagaaataggaacggatgtggagaaaggagtggcagtggagttagctgttttgtctacctgctggatacctgggaagccagactctgtgtggacagtgatccctagtcataggaaactttgcctgtgctgtcatcagtgtccatggagaactgcttctcaccttgagaaatccctcttcttcgttccttcaggtacaagaagagaggatggagacgagggtaggcttcttttcagattatacattctggatcaggaagtctatatcagtgggattttctgaatgacccaggttttttttgtttgtttttgtttgtttgtttgtttgttttagaatttctgtgctttggagctagaaggatatataaatgagaaaactgagaacaaaagaagagacaatatatttttggttgcaagggataagaacctaactccaacaagcaaagcaaaggggggttttattagaaagatacattgagctttctatcagaatcaaaggaagaggtgatcagccaagcctccaaaccagaatcagggtctagaaaaccagagaccacactctttctcaccttatgtctctgctgccctctgcctaatggccttgttttcgcttactatagaccagaatttacacagggatggagaataagccatcacagctttagacctcatatcttcaaatatttgccactcaaatggaaaaagaataggtccagctttttataaaaatcttagggaaggattctgatgggccctgcttgatcacatgctccgtttattgacagtcttcactagaatcacctggtttgggttagggagtagtagtactactaaagaagagattactatttctggaagaaacaaggagagaggtgacagctgcttattacaggaaatgatttaccagagatcctatagcaagttaggagcggactcagggctagaaacagaatcaataaaataggtattaataataatggaagtctctgaattctcttcatttctttccttttcttcttttttttctttcttcctttcttttttttttttttttgagagggggacagggtcttgctctgtcacccaggctggagtggcacagtgtacaatcatggctatggctcactgtattcttgacctccagggctcaatcgatcctcccacctcagcctcccaagtagctgggactataggtgcaggctactttgcccagttaattttttgtattttttgtagagacagggtttcaccgtcttgccaaggtttggattgtttttgtgtgaagtaaacctcagtgttactgagccgttcatttatttagatttttaagagattgccattgaggctggatgcggtggctcatacgtacaatcctagtgactcaggaggccaaggcaagaggatcgcttgaggccagaatttgaaaccagcttgggcaacatagcaagaccgtctccattaaaaaaaaaaaaaaaaaaaaaaaaaaaaggccacatgtgctcgagctgcaggtcgcggccgctagacta

SEQ ID NO: 148 - DNA, 4125 bp, Homo sapiens
  nbla-04171
gaattcctcgagcactgttggcctactggatatttctataaacttttgggaagttgcaccaaacccaataaaggtgcagtatataattaaagttttggtgtattaattagacaatctgagagctcacttgaagataaaaggacaccagatgtgtcagggagaaaaagttgacatgctttagataaaatttaaaatcaaaagctttcaaatcgtcttatgctctattatagcagaatgattgcttagttcaaagtcttgctgacaatttaacacattcagtttgatcatttgggcttagaatttttttttctctttcatatttgcccctcccttgtctccaaataatttttgagatgatagaagaatatacagtatatcaaatatctgacagagggttccctatcaggttcctggctttgaaggtcgagtctcatttatatttagttctcttgtttacaagatggaaaacgttctttcagttttatcactgtagtctacttaggtcaagcttttaatatgagcaaaggcaacttattaatatttataagttgtaaaatttattgacttttaaagaataaaatctcagtaaaatctcacatgcctggaacttgatatttagtggtgacattctctcttctttgtatttattatgagtagagaagtagttttacttcctgctgggttgtattgatggagaataatgaagttaacagtcacagagagcaagtgtgcaggggcacgctcatccttggctgatatgagccccctaatagagcagcaccacctcctcctcctccttcctgccatctgtaaaagctgagacgaaatgacaaccattgtaccctcttggtactgagttgatttaacctcacctttgaaatctggtagggaagaggggtgtcgtatgttttgatttttcctcccctctcttcacatctcctcatccctaattcacttcattaatgaaaattctcttttcttcttttctcagctcttccaactaaggctttgggatataattacaagacataaatcttgcagggaaagaacttttggttttaaagggggaagccatcaaacaaacatctcaatgtcctcatgcctttgttttgtcattactggtcattgttgtgttcagcattgtgggtttgattttcctttttttttctatccagatccccccacaactatccctcctcccacaacaaccaccaccaccaccaccaccaccaccaccaccatccttaccatcatcacaggtatggtatcttcattaccattgaaaatgtcctgaatgtatattgtctttctggtatgtataaaaagaagccgaaaagttccctttaaatccttggaatttaatcgttcctttattttggaactccaacgacattagatactatgttcttaagttgaatcttaaggacctcagaaacatcccagcatttaacagtacgtcagatattttgcagcttatgcataaaagaattcttttttaagcatcactattcaaagcaaaatgctagggaaaatggcagctggctactagagaacacgcctatagcttctacttagacatgtttgatgaaatggtaagtactgtggctttcaatcttgtctctgtcttagtttcatctcagtccatgtaagggaaaatatacacacctaacttcaatgtgcctatttgggccatgctactaaatgcatagtcatccttcctgctccagagagtacccgctgacaagtgatactacctgtttgtgctgcctaggtagtcacaagagatcagagggagtcactgtcttttccatgctgagcactcatgtgcccctccctgccctcggtcacatattggaagagtggaagaggcagccactgtggttctaactctgcggctttatctttttggactgtctgaaactcttattcagcatgagttttactgtctcttgtttctgtcactgagggaggtggcatgccatccagcccttcctggcatccagtggctctctcatactgcttgatgtggcttgtctgggagccatggggtttcttctgcctacctaagtaggaaagcttctggccacactatgtccacttgacatgaaggatttccctagataaggccttcccaacctgtgtttacagggacttaacacaaaaacatgtgaaagtaattattcagtgagaaaaaaatatctcttgaaagagtaacttttccgctgcattttgttagctggtgagactgcaaggtatctgaaccgtgtgccctggtacccacccctgtctctggacttctttatgaacactgagtatttgactccccacccttcatggtcagctccttttaacaccctagatatcattgctgtccttttcattgacatgctagagacatttccaattttcatgggagtcagtaagatagagatgatgaaaattcagagtgttcaaagaaagaggaggcctcatcagttgatagaatatacaacagattgtctaatctcagttttcttcacttttctacccattacagtggaaaaaagaacccttaaggaagccagtgcttctcaacattggttacaaaaccatcagtgccagcacttaatttaaaatcttctgaaaatccatcagttggttttcatgtctcactctaaactcagctccaaccaggctgcttcctagattcttgtctgtgtgtgtttctgttttggctctttgttacttccttctgtaaacttaagtaaactcagtttgttgacctagtgaattgattctttccattttctatactattcaccagcatatcaaagatgcttcttcctaactctgatttccagagtaactgtgctatcagcttttcatactaagaactaggtttttaccttttcacatttcttgcctcctacccagttcgtaagccaaattagactcgtactcttgtgaagtgccctttagatactagtgtaaaatatactgcgtaattctccattgccctacatatattaaccctttaagaaaatatatcaccagtctattttatcttcgcagaacttgcccgggtatgagccagcatttattaccactcattctagaaggtgccagttaggtagctatccaggtttacattttaaggcagtcgagaccttattcacgtggtatataaacaaccacatttctcttttatatggaacaacacctttcatttgcggctggccttctcactagcttatgcttttttttttaagacctttcttagcactcgctgaactcctccccctcacaatcaatctcagcaactcagcagagtcgcttcagttcacagctcttaatccttcactccagactaaagctaatcttatgtcctcaaacagctacaactcactgttatcacagttccgactgcagagactccatttaagaggaaatttaaaaaataaacaatgctctatttctgtccacatcaaaggtacctctaacagaaacttgtctttgcttctgtctctctgctactggactctcagctcaaggtaatgtaagatgatctcatagatgcactttagcctcttgatgttagcagttgagtcctccctgcgcacaaaatacatttgtggtaatgaatgcccagaatctcactggcacacccaagagtagttaaactaaaattgctactaacacaacattgtagaattcgttgccttaatggatgtgatcttctaggcttactgtgtcttaacaagcagtcttatatatatttatcttgcccagaaagtacacttgtagaatttaacatttgctcctttctccaaacagattaaaggttatgcagctgaatgattctgtgtcccattttaaaggtccaggctatcccctagatttagattagttcctaaaaaatcttccagtctgaatcctgacaaatggatagctaaattaatttccactcctcttctctcttgcactgtttggtacattacagccaccattagccttaaaagctgcagcagccaaattcggtgacagtaacataaagcctgagcttaaaaaaaaaaaaaaaaaaaaaaaaaaaaaaaaaaaaaaaaaaggccacatgtgctcgagctgcaggtcgcggccgctagacta

SEQ ID NO: 149 - DNA, 739 bp, Homo sapiens
  misc_feature (8)..(8): n is a, c, g, or t
  misc_feature (263)..(263): n is a, c, g, or t
  misc_feature (335)..(335): n is a, c, g, or t
  misc_feature (450)..(450): n is a, c, g, or t
  misc_feature (560)..(560): n is a, c, g, or t
  misc_feature (602)..(602): n is a, c, g, or t
  misc_feature (625)..(625): n is a, c, g, or t
  misc_feature (718)..(718): n is a, c, g, or t
  nbla-04178-f
cactgttngcctactgggttaccaccaccaaatctttaccttctgaccaagtcatgcttgtttatgatcaacaagaagttgaagctatattcttggtgatcttggtagttgtcataataggagaatttttcagtgcctcttctgtcacaatcgtagacacggtcacactccagtatctgggaaaacacagagatcgctatgggttgcagcgcatgtggggctccctgggctggggcctggcgatgctgtctgtgggcatcggnatcgactacacccacatcgaagtgctcatcgatggaaaggggtgtaagccccccgagtacaggaattaccanatcgtcttcatcgtcttcggcgttctcatgaccatggccttgatccgttgccactcagttccggttccgctacaaccatttcaaaaacgatgattctaaagggaaagaggtgganatcccgcaggtggaaaggaacaactctacagagtcctctgaggagacaccaaccaccacaagccactcgcaggccttcaacttttgggacctaatcaagctgctctgcancgtgcagtatggctcaatgctggttgtggcttgggtcatggnttttggatatggcttcgggttanctttctctactggcatttggaagaacttaatggactcaaccctttttggggtctggtcaatcctgaatcatgtgtctgactgacagcatattntttagtccaagcttattgaat

SEQ ID NO: 150 - DNA, 748 bp, Homo sapiens
  misc_feature (2)..(2): n is a, c, g, or t
  misc_feature (497)..(497): n is a, c, g, or t
  misc_feature (607)..(607): n is a, c, g, or t
  misc_feature (626)..(626): n is a, c, g, or t
  misc_feature (658)..(658): n is a, c, g, or t
  misc_feature (662)..(662): n is a, c, g, or t
  misc_feature (679)..(680): n is a, c, g, or t
  misc_feature (683)..(683): n is a, c, g, or t
  misc_feature (712)..(712): n is a, c, g, or t
  misc_feature (716)..(716): n is a, c, g, or t
  misc_feature (737)..(737): n is a, c, g, or t
  misc_feature (747)..(747): n is a, c, g, or t
  nbla-04178-r1
cnttttaaaaatggtattcatttttatttcaacatgtcaactgtgcatttccaaaacagcaggcttttcaaaggaataaatcagaactgtaaacacaagatacagtacaagtttttgacttcctacagtcagtttcacaaatccacatactgtacattcataggtgaggttaagcctgtcacccatttctttatttctataattacacaagcataataaatacatctgattttaaaggtcacttaaaatgagtcataatttacagtacagtacgtttcagttcaagtgcaaaaaataactatttgctgaattctatttctttcagttattttatttttaagctgtgttttattgtgaagcgagacgtccaagtgtagaatttcttatcccaaatgcagtattgggcagaactatggtgtcatggagaagccctcactttacaattgatcctgctaatcagggtcagagggtaaggtgaagttgctcatttcgactgntcttttctttcctctctctctgtgctcatccacagctattataaattatataattcacctttattcaagctaaaacaggttttccctttttcacacttcccccaggtttnctggtaacctctgctttgntttttaagtggcaagctttacgtgcgatccanccanccatggtctggctgganntgnaacgtttgcagttgcatacattacattgnccantggctgactgggcttcatganaacgaatttnt

SEQ ID NO: 151 - DNA, 747 bp, Homo sapiens
  misc_feature (273)..(273): n is a, c, g, or t
  misc_feature (562)..(562): n is a, c, g, or t
  misc_feature (580)..(580): n is a, c, g, or t
  misc_feature (584)..(584): n is a, c, g, or t
  misc_feature (596)..(597): n is a, c, g, or t
  misc_feature (599)..(599): n is a, c, g, or t
  misc_feature (604)..(604): n is a, c, g, or t
  misc_feature (614)..(614): n is a, c, g, or t
  misc_feature (617)..(617): n is a, c, g, or t
  misc_feature (623)..(623): n is a, c, g, or t
  misc_feature (628)..(628): n is a, c, g, or t
  misc_feature (635)..(635): n is a, c, g, or t
  misc_feature (640)..(642): n is a, c, g, or t
  misc_feature (645)..(645): n is a, c, g, or t
  misc_feature (652)..(652): n is a, c, g, or t
  misc_feature (663)..(664): n is a, c, g, or t
  misc_feature (676)..(679): n is a, c, g, or t
  misc_feature (682)..(682): n is a, c, g, or t
  misc_feature (684)..(686): n is a, c, g, or t
  misc_feature (691)..(693): n is a, c, g, or t
  misc_feature (695)..(696): n is a, c, g, or t
  misc_feature (701)..(701): n is a, c, g, or t
  misc_feature (703)..(703): n is a, c, g, or t
  misc_feature (707)..(710): n is a, c, g, or t
  misc_feature (714)..(715): n is a, c, g, or t
  misc_feature (717)..(717): n is a, c, g, or t
  misc_feature (719)..(720): n is a, c, g, or t
  misc_feature (724)..(724): n is a, c, g, or t
  misc_feature (726)..(726): n is a, c, g, or t
  misc_feature (730)..(730): n is a, c, g, or t
  misc_feature (733)..(733): n is a, c, g, or t
  misc_feature (735)..(737): n is a, c, g, or t
  misc_feature (740)..(742): n is a, c, g, or t
  misc_feature (744)..(744): n is a, c, g, or t
  nbla-04183-f
gcctgttggcctactgggatgcattcatttaaaatatattgagcaatcatataggttttctgatgttcataagccaagtactattctgaaggtgctgagtgactgctctggttatttgattgaaaaaaagatttttattcaatctttttttgaaaaatctagtttctaaacaagttagtctaccttgttacataatgtaggagaatgttatgttttagagaattaggaataattactattgcaaaatcattagattatactcaataaaatggntttaaaacactcctaatggtatgtgtgccatctcctaaaataaaaaaatgcagttcaagaactttactattaaaagtgtcctgaaccaattttttagttgtcaatcaatctacaatgatttcctgaaagaactcagagaatcaagtacttgaaggattataatatcccaaaatcttaacatttattttccagtaacatttaagtaaacattcctaccacaaatactggacagagaataatcttttgccacctattattctttattttaagttgcataaattagcctttngtctgtaaaaagatgaangccnaaagatctgggnnanttacnaatctaaagnttntgaagngctanttcttgntattnnnttnaggattncaattttacannttttttgaccannnntgntnnngctgnnnannttcancnttgnnnngatnntnanngggntnctanggntnnnttnnntntgg

SEQ ID NO: 152 - DNA, 748 bp, Homo sapiens
  misc_feature (7)..(7): n is a, c, g, or t
  misc_feature (603)..(603): n is a, c, g, or t
  misc_feature (650)..(650): n is a, c, g, or t
  misc_feature (669)..(669): n is a, c, g, or t
  misc_feature (734)..(734): n is a, c, g, or t
  misc_feature (739)..(739): n is a, c, g, or t
  nbla-04183-r1
tttttcnttttttgtacattcgaacctttttaatgaaaattacaggtcatcgcctggttaagtgttaaatagcatgcatcagaccatgagaaagctgagacactccatcccccatccacactcccgtcatcctcttccactctcattagaatcaatgagatgtaaggtgatgcactgggcatcttaataagtgaaataagaaaaaagtaggaataagctatgtgagtcttatacggcaattttgctgactggggaagaggctcagtttaaggaaggaacatcatgtccagttttaggcattttaaacatcaaaccttgcgcctactgtgtaatgcagaaattcgactattgagttgtttcaatgaaaatttacaagactgagagcaaaacacattcactattaagtgcaaatgaatcacaaacaggcagaaaacacttccacatagtaattgctattttgagttgagattttaacttctaatctaaaactcctctgttttgtgtcctcacccttgctcaaccacagaataaagacaatattttggatcttctggactaaagaaagaactggcagagaaaaatctcctcatactcagtcactgnacaggaagatggcctgtagtctagattgggggggtgggttctggcantacaaccctgtcttccatnccaaagatctgaatttaaatttaagcaaagtaagactgagggaaaaattaacctaaagtaaatgnatggnaatatatga

SEQ ID NO: 153 - DNA, 741 bp, Homo sapiens
  misc_feature (647)..(647): n is a, c, g, or t
  misc_feature (658)..(658): n is a, c, g, or t
  misc_feature (687)..(687): n is a, c, g, or t
  misc_feature (692)..(692): n is a, c, g, or t
  misc_feature (697)..(697): n is a, c, g, or t
  misc_feature (700)..(700): n is a, c, g, or t
  misc_feature (729)..(729): n is a, c, g, or t
  nbla-04193-f
gcactgttggcctactggagagtatgatgatgttaatttgctgactgctgacttccagcttctttttaacaatgcaaagtcctattataagccagattctcctgaatataaagccgcttgcaaactctgggatttgtaccttcgaacaagaaatgagtttgttcagaaaggagaagcagatgacgaagatgatgatgaagatgggcaagacaatcagggcacagtgactgaaggatcttctccagcttacttgaaggagatcctggagcagcttcttgaagccatagttgtagctacaaatccatcaggacgtctcattagcgaactttttcagaaactgccttctaaagtgcaatatccagattattatgcaataattaaggagcctatagatctcaagaccattgcccagaggatacagaatggaagctacaaaagtattcatgcaatggccaaagatatagatctcctcgcaaaaaatgccaaaacttataatgagcctggctctcaagtattcaaggatgcaaattcaattaaaaaaatattttatatgaaaaaggctgaaattgaacatcatgaaatggctaagtcaagcttcgaatgaggacttcatccactttggctgcagccagactgacaggtccttnacacagtaaangcagccttggtgaagagagaaatccactngcagnattancgnaataaagagccgtccaggaggtcgttatnagcaataccatg

SEQ ID NO: 154 - DNA, 793 bp, Homo sapiens
  misc_feature (1)..(2): n is a, c, g, or t
  misc_feature (45)..(45): n is a, c, g, or t
  misc_feature (91)..(91): n is a, c, g, or t
  misc_feature (119)..(119): n is a, c, g, or t
  misc_feature (123)..(123): n is a, c, g, or t
  misc_feature (133)..(134): n is a, c, g, or t
  misc_feature (140)..(142): n is a, c, g, or t
  misc_feature (148)..(148): n is a, c, g, or t
  misc_feature (151)..(151): n is a, c, g, or t
  misc_feature (155)..(155): n is a, c, g, or t
  misc_feature (158)..(158): n is a, c, g, or t
  misc_feature (161)..(162): n is a, c, g, or t
  misc_feature (166)..(167): n is a, c, g, or t
  misc_feature (170)..(170): n is a, c, g, or t
  misc_feature (174)..(174): n is a, c, g, or t
  misc_feature (177)..(177): n is a, c, g, or t
  misc_feature (179)..(180): n is a, c, g, or t
  misc_feature (185)..(185): n is a, c, g, or t
  misc_feature (188)..(188): n is a, c, g, or t
  misc_feature (195)..(195): n is a, c, g, or t
  misc_feature (205)..(206): n is a, c, g, or t
  misc_feature (209)..(209): n is a, c, g, or t
  misc_feature (215)..(216): n is a, c, g, or t
  misc_feature (226)..(227): n is a, c, g, or t
  misc_feature (233)..(233): n is a, c, g, or t
  misc_feature (235)..(235): n is a, c, g, or t
  misc_feature (243)..(243): n is a, c, g, or t
  misc_feature (247)..(247): n is a, c, g, or t
  misc_feature (286)..(286): n is a, c, g, or t
  misc_feature (317)..(318): n is a, c, g, or t
  misc_feature (321)..(321): n is a, c, g, or t
  misc_feature (329)..(330): n is a, c, g, or t
  misc_feature (338)..(339): n is a, c, g, or t
  misc_feature (341)..(341): n is a, c, g, or t
  misc_feature (353)..(353): n is a, c, g, or t
  misc_feature (357)..(357): n is a, c, g, or t
  misc_feature (359)..(359): n is a, c, g, or t
  misc_feature (363)..(365): n is a, c, g, or t
  misc_feature (367)..(367): n is a, c, g, or t
  misc_feature (369)..(370): n is a, c, g, or t
  misc_feature (372)..(372): n is a, c, g, or t
  misc_feature (378)..(378): n is a, c, g, or t
  misc_feature (383)..(383): n is a, c, g, or t
  misc_feature (385)..(385): n is a, c, g, or t
  misc_feature (399)..(399): n is a, c, g, or t
  misc_feature (401)..(401): n is a, c, g, or t
  misc_feature (404)..(404): n is a, c, g, or t
  misc_feature (411)..(411): n is a, c, g, or t
  misc_feature (418)..(418): n is a, c, g, or t
  misc_feature (422)..(422): n is a, c, g, or t
  misc_feature (425)..(425): n is a, c, g, or t
  misc_feature (430)..(430): n is a, c, g, or t
  misc_feature (432)..(432): n is a, c, g, or t
  misc_feature (436)..(436): n is a, c, g, or t
  misc_feature (440)..(440): n is a, c, g, or t
  misc_feature (450)..(450): n is a, c, g, or t
  misc_feature (452)..(453): n is a, c, g, or t
  misc_feature (457)..(459): n is a, c, g, or t
  misc_feature (463)..(463): n is a, c, g, or t
  misc_feature (467)..(467): n is a, c, g, or t
  misc_feature (475)..(475): n is a, c, g, or t
  misc_feature (479)..(479): n is a, c, g, or t
  misc_feature (492)..(492): n is a, c, g, or t
  misc_feature (497)..(497): n is a, c, g, or t
  misc_feature (499)..(499): n is a, c, g, or t
  misc_feature (504)..(504): n is a, c, g, or t
  misc_feature (513)..(514): n is a, c, g, or t
  misc_feature (516)..(518): n is a, c, g, or t
  misc_feature (520)..(520): n is a, c, g, or t
  misc_feature (523)..(523): n is a, c, g, or t
  misc_feature (533)..(533): n is a, c, g, or t
  misc_feature (536)..(536): n is a, c, g, or t
  misc_feature (538)..(541): n is a, c, g, or t
  misc_feature (545)..(550): n is a, c, g, or t
  misc_feature (562)..(562): n is a, c, g, or t
  misc_feature (565)..(566): n is a, c, g, or t
  misc_feature (577)..(578): n is a, c, g, or t
  misc_feature (587)..(588): n is a, c, g, or t
  misc_feature (590)..(591): n is a, c, g, or t
  misc_feature (593)..(594): n is a, c, g, or t
  misc_feature (597)..(597): n is a, c, g, or t
  misc_feature (604)..(604): n is a, c, g, or t
  misc_feature (608)..(609): n is a, c, g, or t
  misc_feature (612)..(612): n is a, c, g, or t
  misc_feature (619)..(619): n is a, c, g, or t
  misc_feature (622)..(623): n is a, c, g, or t
  misc_feature (625)..(625): n is a, c, g, or t
  misc_feature (627)..(628): n is a, c, g, or t
  misc_feature (630)..(632): n is a, c, g, or t
  misc_feature (634)..(634): n is a, c, g, or t
  misc_feature (637)..(638): n is a, c, g, or t
  misc_feature (640)..(640): n is a, c, g, or t
  misc_feature (643)..(644): n is a, c, g, or t
  misc_feature (652)..(653): n is a, c, g, or t
  misc_feature (655)..(655): n is a, c, g, or t
  misc_feature (659)..(659): n is a, c, g, or t
  misc_feature (662)..(662): n is a, c, g, or t
  misc_feature (664)..(664): n is a, c, g, or t
  misc_feature (668)..(669): n is a, c, g, or t
  misc_feature (671)..(671): n is a, c, g, or t
  misc_feature (674)..(674): n is a, c, g, or t
  misc_feature (677)..(678): n is a, c, g, or t
  misc_feature (680)..(681): n is a, c, g, or t
  misc_feature (687)..(689): n is a, c, g, or t
  misc_feature (693)..(693): n is a, c, g, or t
  misc_feature (698)..(698): n is a, c, g, or t
  misc_feature (701)..(701): n is a, c, g, or t
  misc_feature (708)..(708): n is a, c, g, or t
  misc_feature (711)..(711): n is a, c, g, or t
  misc_feature (716)..(717): n is a, c, g, or t
  misc_feature (721)..(722): n is a, c, g, or t
  misc_feature (725)..(725): n is a, c, g, or t
  misc_feature (728)..(730): n is a, c, g, or t
  misc_feature (733)..(733): n is a, c, g, or t
  misc_feature (743)..(744): n is a, c, g, or t
  misc_feature (754)..(754): n is a, c, g, or t
  misc_feature (767)..(767): n is a, c, g, or t
  misc_feature (769)..(771): n is a, c, g, or t
  misc_feature (778)..(778): n is a, c, g, or t
  misc_feature (782)..(782): n is a, c, g, or t
  misc_feature (785)..(785): n is a, c, g, or t
  misc_feature (787)..(787): n is a, c, g, or t
  misc_feature (789)..(791): n is a, c, g, or t
  nbla-04193-r1
nnaagaaccctttggactgtccgcctactgttgagtatgatgacnttaatttgctgactgctgacttccagcttctttttaacaatgcatngtcctattataagccagatgctcctgangggnaactctcttnncaaacnnnggcctntcnccangcncanntaanntangtanctntnnttganacngcgtttnaccctgttgnncangatggnnttgatcttcnnacctcntnatcctgcntcgncctcccaaagtgctgggattacaggtgtgagccactgtngcccattcaactatgggatttttataatctnnagnttatgcannatgaaacnnangcttacctcgtncatnanctgnnnantnncnacaaangtaantnttaaccacaatccntnctncctgctnaataatnaatntanggtanancttntctnaatatatttngnncctnnngatnaatncaacttgnaatnccttatttctcgntaccnanaaccngtgcacttnnannntntanactaattgtngcnannnntcannnnnngcggacatccanaannctattagacannttggttccnntnncnnaanaatcctnctcnnttngcgaatnaanncncnnannntntanntnttnnttgccttnnancttntcncnaacnntnatnatnntnnaacgtnnntatnaatcntcnctggganccnaaatnnttcnntanccnnntcnttcctaaggnnatcccttttntctctctaccttncnnnaaatttnaatngcngnannncc

SEQ ID NO: 155 - DNA, 2753 bp, Homo sapiens
  nbla-04196
gaattcctcgagcactgttggcctactggatcgtaatgctcatcggaagaataagccgtgtactgatttggaaagtggagaggaaaagaaaaatattatcaatacccctgtgtcttcattagaaatacttttacaatctttctgcaaacttggcctgattatggcatatttctatatgtgtgaccgtgcaaatctgttcatgaaggaaaacaaattttatacacattcatctttctttattccaattatctacattttggttttgggagtattttataatgaaaatactaaagagactaaagtattaaatagagaacaaacagacgaatggaaaggctggatgcaacttgtgattttgatttatcacatttctggagcaagtacatttttgcctgtatacatgcacattcgagttctggttgctgcatatttatttcagacagggtatgggcatttctcatacttttggataaaaggagattttggaatctatagagtatgtcaggttttatttcgtctcaatttcctggtagtggtgttatgtatagtaatggatcgaccttatcaattctattactttgtccccttggtcactgtatggttcatggtcatatatgttactttagcactatggccacaaataatccaaaaaaaagcaaacggaaattgtttctggcattttggcttactgttgaaactaggctttttgctgttattcatatgttttttggcatattctcagggtgcatttgagaagatcttttctctttggccattgtccaagtgttttgaactgaaagggaatgtatatgaatggtggttcagatggaggttagaccgttatgtagttttccacggaatgctgtttgcttttatttatctggctttgcagaagcgtcaaatactttctgaaggaaagggtgaacctcttttttcaaacaaaatttcaaattttctgttgtttatttcagtagtttctttcttgacctattccatctgggctagcagttgtaaaaacaaagcagagtgcaatgaactccatccgtctgtttctgtggtacagattttagccttcatcctaataagaaacatccctggatatgcccgttcagtttacagttcattttttgcttggtttggaaaaatttcattagagctatttatttgccagtatcacatatggctggcagcggacacaaggggtatcttggtactgatacctggaaaccctatgctcaacatcattgtcagcactttcatatttgtttgtgtggcacatgaaatttctcagatcactaatgatcttgcacagattattattcctaaagataactcatctctcttgaaaaggttggcatgtatagctgcatttttttgtggactcctcatcttatcatccattcaagataaatcaaaacattaggttccaaaaattctaaaaaacctaaactcttcaggctacctttgtgtgtctctagaagagaaaagcatctatctggagatataaatgtgtatgtaaatataaacgtttgtggcaagaggacagttctgtgacatctgttgaacatatgtggttgtatatattggaaatgtacatatccaatatgaaatactaaaacaaacaaacaaacaaaaaaccagaatgcattgtataggattgcatgtgaagtcttttctactgaatctatatttccatttataagtgattttaagttaacatatgaaggcagggaaatgattacctttccagtaaaaagtatagataatttaattaacttagtgacaccaccaagtgttttgatataactaaatttgtggtaataagactgtctgcacctgtattcattgtggaacttcctctttcattggaaactttcttactcaagaatgacggcagtattgttttcttatatgtgcaatgaagtggaatgataaacagtatgcctttaatttatatgtgttcttgttctgatgttgtttcctgaaatgatttttcttcctaactgtggttttcgggtatgcaagcctaaatctttgtacactttgtctcacagaatagttctgaggctccatgacagggttttgtcattgttgatgttattgttgcttcgttttataaaaaagccaaaatttttttccaatccaaacgttcacctgtttcctttcctcaagctataccagtgtaataccagttaccctgtggatccatttaatatgttatccccactaattaattttcgtatattatttccaatatttggaaagctctttatagccatttggtatttcctattacccacctcctattttaaatatttatcagtctaaacttgtgcagtgtagtaaacatgcaagttgttatgattgagctgtattaccataagtagaattttaagtaaactggtgaatttgggccatagatgtttttgctttttgtttgatttttttttacaagctaactgttagaggtatacatttatttatctgttgtacagatttgattatgattttaatgtttgaaagattgcacttgtttgcttttactatatgtggggtaaaatatattttctgttcacagtatatgaaaatatggagtaatttaaacagtaaataaacattctgtggatgcttatttttgtattggcaaagtatcaattaaactatatgtgttctttttcaaaaaaaaaaaaaaaaaaaaaaaaaaaaaaaaaaggccacatgtgctcgagctgcaggtcgcggccgctagacta

SEQ ID NO: 156 - DNA, 809 bp, Homo sapiens
  misc_feature (2)..(2): n is a, c, g, or t
  misc_feature (8)..(12): n is a, c, g, or t
  misc_feature (16)..(19): n is a, c, g, or t
  misc_feature (22)..(22): n is a, c, g, or t
  misc_feature (25)..(25): n is a, c, g, or t
  misc_feature (32)..(33): n is a, c, g, or t
  misc_feature (38)..(38): n is a, c, g, or t
  misc_feature (578)..(578): n is a, c, g, or t
  misc_feature (601)..(601): n is a, c, g, or t
  misc_feature (685)..(686): n is a, c, g, or t
  misc_feature (732)..(732): n is a, c, g, or t
  misc_feature (744)..(744): n is a, c, g, or t
  misc_feature (749)..(749): n is a, c, g, or t
  misc_feature (762)..(762): n is a, c, g, or t
  misc_feature (783)..(783): n is a, c, g, or t
  nbla-04219-f
gnagatgnnnnnttgnnnnccnttntttgaannccctngagcactgttggcctactggtttatcaatgtgactccacgggggagtccatggtgatgatgatgaggaggaggatgatgatgatgagacacctctaaacttggaacaagtttaagactttatgagagaagaaaaaaaatcaccaacaagaattgtttgaggaaaaattataactatcctgtgttcattttttttttataaacaataagaaaaagttgttggatttttttttaatgatttcttttttgggggagggaattttgttgcagttttatggtggaaaatgcaaaaaccagagccaggtgcataatcttgtaatctgtggatatccctggagcaggactgagtaccagttaaaatactttttggggatacacatgtgagatactaagtacttgcagaagatttttgtctctctttttaaagtctctttccttggaatattgtgagaatatttgtggccatttaaaggtttgtgtgatttttgctaaaatgcatcaccaacagcgaatggctgccttaaggaccgaccaaagaactnagtgatttactggattcagtgcnatgttttcacctcctgtgagcagtgggaaaaatggccacttcttttggcaagtggacattttactggctcaaatgtagaagacnnaagttagctcaaggtcctggggggaatggaggacatccaagccccntccaggaacctntgggngatgggacttccntttgacccccatgaccagcangggacctttgggtcacattgacattc

SEQ ID NO: 157 - DNA, 769 bp, Homo sapiens
  misc_feature (4)..(4): n is a, c, g, or t
  misc_feature (7)..(7): n is a, c, g, or t
  misc_feature (9)..(11): n is a, c, g, or t
  misc_feature (31)..(33): n is a, c, g, or t
  misc_feature (46)..(46): n is a, c, g, or t
  misc_feature (463)..(463): n is a, c, g, or t
  misc_feature (555)..(555): n is a, c, g, or t
  misc_feature (561)..(561): n is a, c, g, or t
  misc_feature (569)..(569): n is a, c, g, or t
  misc_feature (580)..(580): n is a, c, g, or t
  misc_feature (586)..(586): n is a, c, g, or t
  misc_feature (601)..(601): n is a, c, g, or t
  misc_feature (640)..(640): n is a, c, g, or t
  misc_feature (704)..(704): n is a, c, g, or t
  misc_feature (706)..(706): n is a, c, g, or t
  misc_feature (745)..(745): n is a, c, g, or t
  misc_feature (760)..(760): n is a, c, g, or t
  misc_feature (768)..(768): n is a, c, g, or t
  nbla-04219-r1
gagnggntnnntttgtggccttttttttttnnntttgtttttctgntttttgataattgggaatgctgaaacctcttgcgtctgcgattcataactactcagacttgtcttatattacaaaaatgggggttaaggagaagtgtttatgtgggtttaagataatacagctgttaaggaagtggtctcttgttttaatgaagcaatgtggcaacttggacccttttacatctgtcccatgtgattcgatgcgtctcccattccagggtgtgggccggccaaggagagagggggaggctccgaggacaccttctcttcctcccttcttttcagacacgcagctttcggattcagattcctttctcggacttgctgctccagactgaggatgacggccaccgcctggtggaggatcaggagcttggtctggggcttgcactcttgaggtggagctgcaccatgcggncgagctctttgaaaagcctcgttgatgtcacggacccgaaacgctctcgggcattgtgggcatcttcggtccttttacgctctgccttctgntctggnggcaaggncctcatcgcantattgntagatcttgacctantaattgatttgatatcctcttggcgcatctaattcttgncctccgaaaaattcgggctttgaaggtcttataaccttggcattggatttgactcaaactgcanangaacactttgccctgtagcctggggcatccttgtaaggncctggctgggttagncagggaant

SEQ ID NO: 158 - DNA, 768 bp, Homo sapiens
  misc_feature (2)..(22): n is a, c, g, or t
  misc_feature (552)..(552): n is a, c, g, or t
  misc_feature (586)..(586): n is a, c, g, or t
  misc_feature (623)..(623): n is a, c, g, or t
  misc_feature (652)..(652): n is a, c, g, or t
  misc_feature (662)..(662): n is a, c, g, or t
  misc_feature (664)..(664): n is a, c, g, or t
  misc_feature (692)..(692): n is a, c, g, or t
  misc_feature (700)..(700): n is a, c, g, or t
  misc_feature (708)..(708): n is a, c, g, or t
  misc_feature (725)..(725): n is a, c, g, or t
  misc_feature (730)..(730): n is a, c, g, or t
  misc_feature (732)..(732): n is a, c, g, or t
  misc_feature (734)..(734): n is a, c, g, or t
  misc_feature (743)..(743): n is a, c, g, or t
  misc_feature (747)..(748): n is a, c, g, or t
  misc_feature (756)..(756): n is a, c, g, or t
  misc_feature (764)..(764): n is a, c, g, or t
  misc_feature (767)..(768): n is a, c, g, or t
  nbla-04241-f
gnnnnnnnnnnnnnnnnnnnnnttggattcctcggcactgttggcctactgggagtaatgaagggtgaatttcgagctgtgaggcagtaaacttattgcagttcctcaaacttagaaattgggttgaatcccaataccctaatttcctgttccacatcacatttcaactaatacttgccttttatcacagcaaccaccaacaacctagctttgcaaagaaatgacatcatcaaaaggaaaataacacaatatgttaaactgtgaattcgcttgaaatagtcattcatgcaagcatctgagaaatgttgtgtattgctttgtttccctcaaagacaaaatatcctgcacacctctgtgaatttgctgtagtgccctgaggtacactggcacataatttggggacctcagaactaaaatcatgtctttttcagcaactcttgaccgcatcactgtaacatatgagattgtaagatgccaatttggttaagactacgagtaatgtgtaaagtgaaaattgtatggggtcaagtattattttaaaaagcctcttangaagttaccaggttggaggctgatataccatctnctattaagtataagacttactggcactggttccttancattgaaacaggttgctattctttaagancagatcctananttagcttggctttgagcattttgctaanaaccaatnccttggcntaaacccaacatcattntcagngngngaaaagctnacannggaaaagnccattccnagnn

SEQ ID NO: 159 - DNA, 3553 bp, Homo sapiens
  nbla-04246
gcactgttggcctactggttatgccaaagaacaaacagttcctgcagctctcatgttgtattcaccacaaattcaggaagtggctgaagaaggggattacatgcctgcacaaatctttagtgctatcgagagtgtcaagctttgaaaccctttgaatacttctgaagagcaagcgcccactgatgctgaggtcaacaaaatcagagaagctgacatttccattttttgccaatacttcaggtgacctcataatgaaacccttgctgctctacagaaaattgtgcccaaaccctctcaggggaaataaatgagccaagtttccagtgtactagcaagcaaacagaaaagcccagatgaatcttcctctccttaagggatggtttgaacagtactttcttgtggatgttcaagactacttaaaagaaaaaaaaaataccttgaattcaaagtcctgctgattcttcagtctatttggtgcttcaggtacatttgccaatatgcatcctcatggtaaggttgtctttataactagccacatgtctgagattcttgagcctttcagtcagtgtttgatctggccattcaggaaggcttattataaactaatgtataactttgttcacaatctcgcaaagtttccactgtctgaaaatcctagtgcatgagactcctacatcgttattaatggcatatccttaataaaagtttggcttttgatttttaatgggttttcaggagataacttcccaaagaggcattagatagtttaacagagcctgtcattaatgtgacctgtgagaagacttggctagaggtggtgaaatatctttcctctatccctcccaaagacaagaaaaacctatggatgaggatgaaaatttggcacaagagcaatcattggcggaagttgaatctgaaactgttgacaccaattcaagttaatgctgctagaggctgatcctcaggaagctttcttgactccagaggttattatcataagtgatgatgaagacaattaggaggctgtgggactggaaacaaatacagcaataagaaacaggagcaaaatttttagaacaagattaaaacctccctaagaaggtaattaaaattggcatctttacatgtgtcagatattacctgttcaaagtttgagtgacttagagttctataaagaggtgctatgatgccatcaaacataatcatattggacagaaacaatcttcaatagaacttaaatcatgtgccatttattactgttgctggacagctgataaaactaccttctgacaaagtttgatttaattagactctaataaaaggtcctatgagactttctaaaagactatattgggaagaaagaaacctcagaaaagtctaaattatcaagtagtaccatttaaatactcttactggacagctaataagctaccttcagacaaagattgaatgattaaattgaactccatacagaactgctaaggtgtcttcaaaaaggacttgagaagatgaaagcatctttagaagggccacttaaattcacttgcttgatagaaataaagcctcaagcaagttgttataacttcaggattcgacttcactgactctaagagtatagacatccataatttgaactaatgaatagtccacttctgttcattgcttctctgtcacccccatttgccactaccataatgagtgatagatacatcttcatcacctctggaaatcatctcaggatctaaatggaaactgtataaagcctatcatttttactgatttaaactatgtaaactcattattctttttatgtaatgtgctgttgttattgtttacctgcataaaaatatttatgagggttttcaacagtttacttgagacctcatttttgcccatttttttccttcccgatatcatgatcccctcagctgaactttcttaccttgggggttgttcaggaactgactctcatggggaaagagggattactatttctgtgttcctatctcttggcaactgcttaaccacagtcagtcttgaactaatggaaggagcactggacttgggttcttgagacctgggttcatgttcagttctgccactgattattgtgacattgggccagtcacttgatttctctgagcctcagtttcatcacctgttaagtgaggatagtaatacctggcacaaatatcacaatattagtgataattgaatataattataagtacccaatggctattaaaagtaaaactaggaagtgctgaataaccataatatcattatatttgtagcattttggaccttatcaatgaacaactgagaaaactaggtttttgaattcttttactttttaaagtaacttcctcccatttttatgtcaattatagaaaattttaaaaagaaaattaaatgtgcctataattttataagccggaggtaactaagttggtatttttcttcttagtacctctttgtctcatcataaattgttcatcaatgtcaaaaacttggaaaataaagataagcatatagaaaaaaataaaaaccacccataatcacaaatcccagaagcaatgttaatattttggtggatttatttccagtctttttctatggctatatgtgcacatatataatttttacatagaaaaagtcataatgcatacagctttgttgcttttagcatttttatcatgaatattttcctacatttatgcaaagtatttgtaaatatcattttcaatggtgtataatatttcatcataggatgacatcatggtttagttaaccattttcttttgttggatatttgagggtctttccaaatttggccattgtaatttcacaatgtctttttcattacctaactgaaaatatttgctttggtgaaagcagaggattttttgttgtttgtttgtttgtttttgaagaagtccttttaatagctacatttcattgactaagtggaacttcaagagacaggtagaagaaaaaaaaaaagaaacagtagatgtaatttcaagattgaggatttattttgttagtgactgttccagaagctgaattttggtgttagagcaattcaggagggacagtttgccaccattttatgatactttactgtagaaaagttttcaggatttagaccaggaaagagacatcctaaccatatgggttgattttattttatggaccctgtgaagtctgggactgatcaggtttctcttttgttggctactagaaagcttggagtcaaatgtgtggtcaatgcatagcacttgtaatgggactctacggtatgtatgcactttgtattagctttctgccaggctccatttcgtgttcctatctttattgtttttgttttttccttttactttcttatctactttgaatttatgctatcatgttgtattttgtgtattcttgtaagccacctgacatccatcttggaacatggtggggaataaacacactaataaataaatacattaataaaaaaaaaaaaaaaaaggccacatgtgctcgagctgcaggtcgcggccgctag

SEQ ID NO: 160 - DNA, 1971 bp, Homo sapiens
  nbla-04261
gaattcctcgagcactgttggcctactggatctgtcactaacgtcactgcgaccgacgctgatgacccagtttatggaaacagtgcaaagttggtttatagtatattggaagggcagccttatttttccattgagcctgaaacagctattataaaaactgcccttcccaacatggacagagaagccaaggaggagtacctggttgttatccaagccaaagatatgggtggacactctggtggcctgtctgggaccacgacacttacagtgactcttactgatgttaatgacaatcctccaaaatttgcacagagcctgtatcacttctcagtaccggaagatgtggttcttggcactgcaataggaagggtgaaggccaatgatcaggatattggtgaaaatgcacagtcatcatatgatatcatcgatggagatggaacagcactttttgaaatcacttctgatgcccaggcccaggatggcattataaggctaagaaaacctctggactttgagaccaaaaaatcctatacgctaaaggtagaggcagccaatgtccatattgacccacgcttcagtggcagggggccctttaaagacacggcgacagtcaaaatcgtggttgaagatgctgatgagcctccggtcttctcttcaccgacttacctacttgaagttcatgaaaatgctgctctaaactccgtgattgggcaagtgactgctcgtgaccctgatatcacttccagtcctataaggttttccatcgaccggcacactgacctggagaggcagttcaacattaatgcagacgatgggaagataacgctggcaacaccacttgacagagaattaagtgtatggcacaacataacaatcattgctactgaaattaggaaccacagtcagatatcacgagtacctgttgctattaaagtgctggatgtcaatgacaacgcccctgaattcgcatccgaatatgaggcatttttatgtgaaaatggaaaacccggccaagtaaatatctccatgttgttaatgctgaatatgtttgtatacaactgtctcatatttgactaacctgcattatattgtgcatttgcatcatttatgatctgcaaagtctcaggcaagaaacacatccaaatgggaacagagagggaattttttttctccatcagatgttatttctcttcctacttatgaccaaattggctcctaaagtggaacaacctgctgtgccacaaacccagagccaaatcactgtcttaaaatatcttgggatatggatgatagcaggagatgtcttagagtgacgggggctgaatttttactttcaaatgacaagaagcaaggtaaaacctcgtggagaggagacatttgtttcacagcaaacatatgaataccaaataatagtgaaacccaagaaggccagtggtttatagaaagttgtaggaagtgaatattgaaatctgtaaatatgtaaatatatttagataaacataagatgaacaacacgttttacatgtgtgtattagtagaacattttttgtgcctcatattgcatagatgggtcaatgaaaacagaaaaaaaagaaacataaagaaagtgagagagagggagaaggaaagggagagggagagggaatgggaatgggagtgggaggaagggagggagggagagagaaaaagagggaggaagaaagggaggaaaatagttaaacaagcaagatgaacagaaacaaatatctgctatactctgaatgtcaaaatggaaatagcctgtgtaaagttctgcaaaaccataaatgtaatagatttattttaacaaggtaccaaagtactgtatgtttaagaaatttatcatttttcaacttcctaatttatttctggatggtgacattttaatttaaataaacagcagctgacagtaaaaaaaaaaaaaaaaaaaggccacatgtgctcgagctgcag

SEQ ID NO: 161 - DNA, 785 bp, Homo sapiens
  misc_feature (2)..(7): n is a, c, g, or t
  misc_feature (10)..(16): n is a, c, g, or t
  misc_feature (19)..(22): n is a, c, g, or t
  misc_feature (530)..(530): n is a, c, g, or t
  misc_feature (582)..(582): n is a, c, g, or t
  misc_feature (630)..(630): n is a, c, g, or t
  misc_feature (653)..(653): n is a, c, g, or t
  misc_feature (664)..(664): n is a, c, g, or t
  misc_feature (687)..(687): n is a, c, g, or t
  misc_feature (703)..(703): n is a, c, g, or t
  misc_feature (724)..(724): n is a, c, g, or t
  misc_feature (728)..(728): n is a, c, g, or t
  misc_feature (739)..(740): n is a, c, g, or t
  misc_feature (744)..(744): n is a, c, g, or t
  misc_feature (750)..(751): n is a, c, g, or t
  misc_feature (764)..(764): n is a, c, g, or t
  misc_feature (767)..(767): n is a, c, g, or t
  misc_feature (770)..(770): n is a, c, g, or t
  misc_feature (783)..(783): n is a, c, g, or t
  nbla-04264-f
gnnnnnnttnnnnnnnttnnnnttggattcctcgagcactgttggcctactgggatagaaatttatgctctctccatttgtctgatgttcaatgaaagacacaaacaactaaacaggtagttacaaatactgtgtaataagttgttgtggaaagtacattgtgctatgagaactcaggaataagacatagtccagatttggaggatcaggaaagacctccatgggaagagatgtataagctaagactagaaatgggacctggaaataaaacttgggctcattacggtagcaacaagacctggagacttagatgtaagatagaagaagaaaggctccttgagaagcttaaggagacttagatgtaagatagagggaaaagaaagcctcctggagaagcttaaggaggggcatgggatgcataatgggcaaggtggggctgtccatgtattaactaagaggagagctggaaaagacgatgaagggccttgacatctaaattacacacaaacatgtaaaattacatgcaatgnattttctttgcaaagaagacagagtgatgtctaatatatttcagatttctgncataaaagcattttaaaaggtcataaaacttaatatttaaaatggtanttttttttagaaaaataccttgngtgacttaagnatttcctgaataaatgagctttnctgggaatcctcatantatcaagcctttggtcttaanaaanggaccaaggtnntgtnggaacnnggaaaaaaatggnttnaanaatttaataatcntt

SEQ ID NO: 162 - DNA, 784 bp, Homo sapiens
  misc_feature (1)..(2): n is a, c, g, or t
  misc_feature (4)..(4): n is a, c, g, or t
  misc_feature (7)..(12): n is a, c, g, or t
  misc_feature (15)..(15): n is a, c, g, or t
  misc_feature (34)..(35): n is a, c, g, or t
  misc_feature (639)..(639): n is a, c, g, or t
  misc_feature (656)..(656): n is a, c, g, or t
  misc_feature (667)..(667): n is a, c, g, or t
  misc_feature (678)..(678): n is a, c, g, or t
  misc_feature (680)..(680): n is a, c, g, or t
  misc_feature (732)..(732): n is a, c, g, or t
  misc_feature (735)..(735): n is a, c, g, or t
  misc_feature (739)..(739): n is a, c, g, or t
  nbla-04267-r1
nngnagnnnnnnttntgtggcctttttttttttnntttttaagtaatgggtaaagtttatttcatttttaataacaattagaggacaaaatgtttaaaatttgcagtttaaaacatgcacattcacaaaaggccaatgacacataacactgcatagaaataatattactcaattttaataactataaaacacagtgcatcaaacatcaagataaacaaacctgagaaaactactataaccacagattcaatactctccactcatgcagcttcacaatttctacagcagtttcaggaggaatggtttttcagggagctgaaaatactactttatctttaacgcaaaactgcagttttctgtagtagctgccttccaaggctgccctgtttttcttaacctaataaacttgaaaatgtaaaaaatgacgattaaagtagttaaacaacagatagtatttactgcatttatggcttccatttagaaccatgaaacataaaaatattatttttaactattctgctcacatctttgcaagaacagatttacctgtggaaaggtgctggtaattcaaagtaagcaaatatgaaatctaagtttctacttaagggagattattgctgagaagtttgggagccttantaagaaaagtcttaaangcagcttaacnggaagatcaantnaattggtcaaaattctttggaaataatctacttattaaaaaagtgggccganggnccantaattggctctggaattttaaattcaggtaggccgggaaaaactt

SEQ ID NO: 163 - DNA, 793 bp, Homo sapiens
  misc_feature (2)..(3): n is a, c, g, or t
  misc_feature (6)..(7): n is a, c, g, or t
  misc_feature (9)..(11): n is a, c, g, or t
  misc_feature (15)..(17): n is a, c, g, or t
  misc_feature (20)..(24): n is a, c, g, or t
  misc_feature (30)..(30): n is a, c, g, or t
  misc_feature (36)..(37): n is a, c, g, or t
  misc_feature (73)..(73): n is a, c, g, or t
  misc_feature (277)..(277): n is a, c, g, or t
  misc_feature (637)..(637): n is a, c, g, or t
  misc_feature (653)..(653): n is a, c, g, or t
  misc_feature (664)..(664): n is a, c, g, or t
  misc_feature (675)..(675): n is a, c, g, or t
  misc_feature (739)..(739): n is a, c, g, or t
  misc_feature (753)..(753): n is a, c, g, or t
  misc_feature (772)..(772): n is a, c, g, or t
  nbla-04271-f
gnnggnngnnnttgnnnccnnnnntttgantcctcnncactgttggcctactgggttcatgatgtccaagaanattgagaggagctactgaattgtgtttccctaagttcatttacactttagcagcaaatcttgatgatcagagcctaaggatgcctaagtttacatggagtggtaatggttaagtaaattgatttgggtaatttttcaacctcatctacaccacactaagaccaaagttctctaaaaatttctgaaataatgatttttatatagnttcattaaaagttttaaaagtatctatcagcattttctgtaaaagtgtcaggctgaaaagataccactaaacagtcagctcaaaaaagatagtagataaaatatgatgaattgccacatctgcatttcctatgtttgcaagccaccagtaagactgcatgatttccaagttggaggacagagtctaggaatgtgaaggatgaagggtttcttgtgcaccgttctcttgagcacgtacgccttcagaaggtagataggctaacctgcatcactggataaaaactggatttctcttactttttcatgtgtatgtggctcatgtagattttggtatttttcttggaaaatatgttcccgctgnctactgaagtaactgngtaataatttncaattttctgntgggcattacctcatggacaccatgccaccctttaaacttcatttacccaaaaccatactcaantattcccccataanccttttcacctatggttcnttatcaaaatcacctttctta

SEQ ID NO: 164 - DNA, 795 bp, Homo sapiens
  misc_feature (8)..(11): n is a, c, g, or t
  misc_feature (32)..(33): n is a, c, g, or t
  misc_feature (480)..(480): n is a, c, g, or t
  misc_feature (569)..(569): n is a, c, g, or t
  misc_feature (571)..(571): n is a, c, g, or t
  misc_feature (597)..(597): n is a, c, g, or t
  misc_feature (615)..(615): n is a, c, g, or t
  misc_feature (630)..(630): n is a, c, g, or t
  misc_feature (644)..(644): n is a, c, g, or t
  misc_feature (654)..(654): n is a, c, g, or t
  misc_feature (657)..(657): n is a, c, g, or t
  misc_feature (662)..(662): n is a, c, g, or t
  misc_feature (693)..(694): n is a, c, g, or t
  misc_feature (698)..(698): n is a, c, g, or t
  misc_feature (701)..(701): n is a, c, g, or t
  misc_feature (719)..(719): n is a, c, g, or t
  misc_feature (730)..(730): n is a, c, g, or t
  misc_feature (738)..(738): n is a, c, g, or t
  misc_feature (740)..(740): n is a, c, g, or t
  misc_feature (750)..(750): n is a, c, g, or t
  misc_feature (763)..(763): n is a, c, g, or t
  misc_feature (782)..(782): n is a, c, g, or t
  misc_feature (786)..(786): n is a, c, g, or t
  misc_feature (789)..(789): n is a, c, g, or t
  misc_feature (792)..(792): n is a, c, g, or t
  misc_feature (794)..(794): n is a, c, g, or t
  nbla-04271-r1
gaggggtnnnnttggtggcctttttttttttnntttgccagtttttatgttgaagaagaaaaaatatgaataaacaaataagtaacctatttttggtatcaagtaaatgtgcagcctagagaagggggataattctagaaattggaaacaaagttggccctttcaagttaaaccactagaaatatacaagggctgacatttctgcagatactctaagagacggtgagttccaagggaaaaggggacctcccaaatcaaatcagggcattacaaaatctaatcaaggtgacaaggatatatccccagcataagactgtaactaaagtggaagggggcaggatcattcactcattcattcttgcatatattcatttcaccatttattattaatagcagcaatctgctttgtgtaaagtgctacacagagataaacgagaaataccttgcatttagacagcaacttaaaatttcaaaagcagntttatcatttagagtccgtggcagggaacagatggcaaacctgactttggtaatttaaggagcctttaataaagggactggttattaangngtgggtagagtacagggagaccacangggccagtactctggggnctttactacctctanggcctaaggagccncatgaaggangtnattgnttcaacagaacctggagatatgaaaactgtnnaaanggnccacttgcacaactgggnccttaatcaanggactctntnattctaaggngacatgttggaangggatggggaatccttttnaccnccnctntnt

SEQ ID NO: 165 - DNA, 3028 bp, Homo sapiens
  nbla-04300
cactgttggcctactgggatgcatgggaaaagcactgctgtgctagaaatggactattcaattgttgattttctaacgctgtgtgaaacaccatacccaaatgattttcaagaaccatatgctgtggttgttcttctagaaaaggatttagtacttatagaccttgcacaaaatggatatcctatatttgaaaatccctaccctttgagtatacatgagtcccctgttacatgttgcgaatattttgcggattgtcctgtggaccttattcctgcactttattctgttggagctagacagaaacgtcaaggttacagcaaaaaggaatggcccatcaacggaggtaattggggcttgggtgctcaaagttacccagaaataattattacagggcatgctgatgggtcagttaagttctgggatgcttctgcaataactctacaagtattatataagctaaagacatctaaagtatttgaaaagtcaagaaataaagatgacaggccaaacacagacattgtagatgaagatccatatgccattcagatcatctcctggtgtccagaaagtagaatgctgtgcatcgctggagtttcagctcatgtcattatttatagattcagcaagcaggaagtaatcacagaagtcattccgatgcttgaagttcgattattatatgagataaatgatgtggaaactccggagggtgagcagccaccacctttgccaacacccgtgggagggtccaaccctcagcccatccctcctcagtctcatccatctaccagtagcagttcatctgatgggcttcgtgataatgtaccttgtttaaaagttaaaaactcaccacttaaacagtctccaggttatcaaacagaactagttattcagttggtttgggtgggtggagaaccaccacaacaaataaccagcctggcagtcaattcttcctatggactggtggtttttggtaattgcaatggcattgctatggttgactacctccagaaagcagtgctgctcaacctgggcactattgaattatatggctctaatgatccttatcggagagaaccccgatctcctcgtaaatctcgacagccttcaggagccggtctgtgtgatattagtgaagggactgttgttccagaggatcgctgcaaatctccaacctctgcaaagatgtcaaggaagttaagcttacctactgacctaaagcctgatttagatgtaaaggataactcctttagccgatcacggagttcaagtgtaacaagcattgacaaagaatcccgagaagcgatctccgctcttcatttctgtgaaacgtttactcgaaagacggactcgtccccttccccttgtctatgggttggaacaacgctaggaacagtgcttgtcattgcactgaaccttcccccagggggagagcaaagacttcttcagccagtaattgtgtctccaagtggtactatattgaggttaaaaggtgcaatcttgagaatggcatttctggataccacaggctgcttaataccacctgcgtatgaaccctggagagagcacaatgttcctgaagaaaaagacgaaaaggagaaattgaaaaaacggcggcctgtctcagtatccccctcctcttctcaggaaattagtgaaaaccagtatgcagtgatatgttctgaaaagcaagcaaaagtaatctcactgccaacccagaactgtgcttataagcaaaatattacagagacctcgtttgtgcttcgtggagatattgtagcattgagtaacagtatctgccttgcctgtttctgtgccaatggacatataatgacttttagtttgccaagtttaagacctctgttggatgtgtattacttgccccttaccaatatgcggatagccagaacgttctgctttaccaacaatggacaagcattataccttgtttcacctacagaaatccagagacttacttatagtcaagagacctgtgaaaatcttcaggaaatgttgggtgaactcttcactcctgtagaaacacctgaagcaccaaacaggggattctttaaaggcttatttggaggtggtgcacaatctcttgacagagaagaactatttggagaatcgtcctcaggaaaggcttcaaggagccttgcacagcatattcctggccctggtggcattgaaggcgtaaaaggggcagcatctggagttgttggtgaattagcacgagccaggctggcactagatgaaagagggcagaaacttggcgatctggaagaaagaactgcggccatgttatcaagtgcagagtcattttctaaacatgctcatgagattatgttgaaatacaaagataagaagtggtaccagttctgacaaccagaatccaataagtccaacttcagccagaaggaaaaaagttttccatttttattacattctttaggaaagttaacgttaaagggatgttcgtcactgaatactgttctttcctagcacagtcatgcactgttttacctcagtcatgtggctttaactgaggagtgttcacacgcactcgaaatggagtatatggtgtgtgccagttatgagttgaccatttgggaattaaacaggtcacacgtgacagatgaagaaaccaagggggctgctgaggagacctggtgcagggactaatcctggatcattcctgtattaaactttcatatgccaaaagggtttgtgccgttttatctgccatcagtgtttgacctgtttagggcagaggcaataagtcagaagtcttgaagttgaaatagttatatgtgtgtcattggactggattataaacagctgtcttggactttccctctcttaacactgactggtcatcagtatcattagtgaaaaagaaacaaattgtttgttatcatctctttagacagataagctgaatggtgggctttaaataataaaaacatacacatagttgaaaaaaaaaaaaaaaaaggccacatgtgctcgagctgcaggtcgcggccgctag

SEQ ID NO: 166 - DNA, 784 bp, Homo sapiens
  misc_feature (4)..(6): n is a, c, g, or t
  misc_feature (12)..(12): n is a, c, g, or t
  misc_feature (14)..(20): n is a, c, g, or t
  misc_feature (44)..(44): n is a, c, g, or t
  misc_feature (54)..(54): n is a, c, g, or t
  misc_feature (62)..(62): n is a, c, g, or t
  misc_feature (700)..(700): n is a, c, g, or t
  misc_feature (736)..(736): n is a, c, g, or t
  misc_feature (774)..(774): n is a, c, g, or t
  nbla-10010-f
gggnnnggttgngnnnnnnntttggaattcctttagcactgttngcctactgtnaaaaaaanattggaaaatatttaaaggagagtaaaaggaataaacacagaattataatagattgataagatataccctccaaagtacaagatttctataattttaatccatgggtaagagaaatgtctaactaaattttgtgtgtgtgtgtgtgtgtgtgtgtgtgtgtgtgtgtgtgtacatgcgcgaatgtttccaatcagatcctcgggaataaacaaggagaagaattaaatatcagtactggacccttgatctttcctttcaccttaggctgcctttagattcccttttggagctatgaatataccccttagttacaggtgtacattgccaatgtatgtatcttagcctgggatagctgaagtgatttgtctagttatttgaattttagcatttgagagattttttaagtgaacacctagcctttaacaccataagaaaagccttgtgaaatgatagaagtatttttaatttggacagttgaggggaagatatcctaacagcaatttttttttaagtgtttctgcttttattcttctagaaatttagaaaccgtttcaagtgaaatccactttttttgtggggcagaagactatatatagattaatttgggcatttttttctaacgtggagtcttcttatncagaaaaatggatgtcttcccaatttttaaaaatanttcaacttttattttaaatgcaggggggtcatgtgcanatttcttaca

SEQ ID NO: 167 - DNA, 781 bp, Homo sapiens
  misc_feature (2)..(2): n is a, c, g, or t
  misc_feature (5)..(5): n is a, c, g, or t
  misc_feature (8)..(10): n is a, c, g, or t
  misc_feature (28)..(29): n is a, c, g, or t
  misc_feature (724)..(724): n is a, c, g, or t
  nbla-10010-r1
gnagngtnnnttggtggccttttttaannccctttttttttctgtgacggagtctttctctgtcacccaggctggagtgcagtggtgcgatcttggctcactgcacctctgcctcctgggttcaagcgattctcttgcctcagcctcctgagtagctggtgcatgcgccaccgcacgtggctacttttttttgtatttttagtagagatggggttttgctatgttagccaggctggtctcaaactcctgacctcaagtgatccaccgaacccagcctcagatgatattcttaacagaaatattaaaggaaggtgtaagagaacatgtggtgacttgagttgacaaaagaacatactggtgaaaacgtggcaccagagttctgaagagattggcactccgagctgtgcattaggaaatcatgttgccatagaggtggtaactgaagtcttgggatttttaagaacacgcttactgcctatatagaaactgaaaaggtaggtggtggataaatgtgtgtctggagttgtttaagaatgagttaacaaaaagacaacatgcttctgttcaagagtcaatatttcacaagttttcagctcatggaaaagactgaaataaatagaaaaaggaatctagaaagaagtactccttattctcttgaatactctttgaagatgcagaaaatattctatctaagaacactcttacccttaatggatccttaaanctttaatctatgctgattagaaacacattacactggaatcattgatttgcctttttt

SEQ ID NO: 168 - DNA, 1475 bp, Homo sapiens
  nbla-10070
ttctaggcctgtacggaagtgttacttctgctctaaaagctgcggaattcctcgagcactgttggcctactggtttcgctaaatgctatagctttcttcaaataaaaattagccagaaaaataccttagaaaagattttttttttcattgtggattccaggagacttttaagacatggaattctcggtgattatattcaaatggcagagccacatttgctaacagtattttctaattttatctttcttataagaaaaaaagggtaaaaatcggatctgaaatactgacagggttccccaaagttagatattaacacagcttttcatttctcttatgagaactttactgtaaatatacctttatcatagaaatgagatatccaatacacattacaaaatgtcatatttaaagatgacaaatctattcttaacccagattcttcatccacagaagtttaatgactaaaataacacaacagaatgaacaaatgttttattggcatgttcattgttgtaaacagcatctggcatgaaaaagttttaccaaaaccttttttattgatttttataaattagatggtatgtcaaaatttatgtagaattgtgttcattgagtacttttatttagcaaagcaaaaacttgctgatactaataaactctgcaatgaaatcatgttgactgcatcagtctgtaccatgacctgacctcattagcaagtttattcagaacaatgttaagacgtttcccaaaagttaaactacatgtaactacaaattgactctaaaaattaaaactggacttacaagcattctagaagattcaaacttgaagtaaatcttcaaaactagatgtacaaagagaaaaaaattgaagccgctgaacagagaaacctcattaacaagggcaacgacaatcctatgggacctagcactgaggaacctcactgaggattacatttacatagattgctatacttctcaatgtacacaaatgtacagaatgaatgatacgtgaaaagaataatcatggcagatagttgaactgcaattatgataactcaacaggatcaattttatttacatgctgaataaatgaatgaaacatattctctacatccataacttaagtacaatcagttataattacaacactgcagcaatctgagctgccacctgctgggatcggtctaagggaaacgttctgatgttccagaataatgttcttaatactctgcaaaaaatgaaacaaaataaaaacacaacttcacaattccttactgggttacggctggttccaagaatttcttttcttcagctcctgtttttgctgctttccaagagtcaacacacgttggatttacttctgaattgtcaatgaggtaatgtgtgcatcagtgaaataaacagaaaattcattcaaaaaaaaaaaaaaaaaaaggccacatgtgctcgagctgcaggtcgcggccgctagac

SEQ ID NO: 169 - DNA, 1557 bp, Homo sapiens
  nbla-10071
gcctgtacggaagtgttacttctgctctaaaagctgcggaattcctcgagcactgttggcctactggctttcatgcagcgaggacaatagaattttactctgggatacccgctgtcccaagccagcatcacagattggctgcagtgcgcctggctaccttcctacctcgctggcttggcatcctcagcaaagtgaagtctttgtctttggtgatgagaatgggacagtctcccttgtggacaccaagagtacaagctgtgtcctgagctcagctgtacactcccagtgtgtcactgggctggtgttctccccacacagtgttcccttcctggcctctctcagtgaagactgctcacttgctgtgctggactcaagcctttctgagttgtttagaagccaagcccacagagactttgtgagagatgcgacttggtccccgctcaatcactccctgcttaccacagtgggctgggaccatcaggtcgtccaccacgttgtgcccacagaacctctcccagcccctggacctgcaagtgttactgagtagattggatttaagacaaaaagcaagtcccccatgagtgtccacttctttgccctgccctctcagcttgtgagacaacacaggagccttctatagtatgttgatatgctagatctgtgccgttaataggcatcgtctctcagcctgagggaggctggattctgggttcctgtagtcacagggaggaaaagctttcttaaaaatggacatgtatgtgcgtgtgagtgtgtgtgtagatttatagtttttggtagtggcaggaataaaaaaaatccatcctacatcttccctaagcactgcctctctctcaccccccaaaacaagttgacgaaagggttttatgtagctgtctatgaggaattggccgtgtctgggtgggttatgggatgtgggcatccctgggttcttggaagcagctcttatgctactcatagagatgggattgactttatttttttatagtgcttaattcaccattatgagaaatgcttccagtcacaaaaatgcagcccagctcactctgaggaagaagcaggacttggtacggttttacacaactccttaccattaaactgaatcagaaatccattttctggctgaataaaaagtttggcttgcctgtgtaatgcccactcccttccccctggctccctagtgatgggacatatatgagagagaagtgtttttctatcatagacaccataggggaaagtttggggatgaaggagagcttaaaggtgtttcaattaagttagaaaactgacacaggctgttgagaattctttgccacttttcccaccccaaaacagcatggggcctgacatcttctgccctggtcccctttctcttgatgtggaaagtctgaatgcagtatttatagacttctaaggttttaaaatccagtatcaagaagaaaatcagaaataccggttggtgaaataaagagtttaggcattgttaaaaaaaaaaaaaaaaaaaaaaaaaaaaaaaggccacatgtgctcgagctgcag

SEQ ID NO: 170 - DNA, 1783 bp, Homo sapiens
  nbla-10111
gcctgtacggaagtgttacttctgctctaaaagctgcggaattcctcgagcactgttggcctactggttactatggatcagtcggcactcgggaacagcagcaaggaaaaaaagcaaatttcattcacatgttctgtgttcatacctcttctctacctaattgttcatttaaatttcagccttattccttgataagggattttaccacatgaagtcatccagtgaccctagctcttattgtgaagttagtggagtatacttagaaatgttacaactttaaaatgttacaaaacattcattaaagctcatatttaaagtagagcatctagtttgagaaatagaaatcaattattaaagatgtcttttttctacccatttaactagttaaaaccatgacatgtaaatgtagaagtagaataatcatagaattccctaaaatatttctgtttactaacatatattgaccaagtacatcaagcaggagagatcttccttcattctgttatagtccacatcattctaattttgctcagttgttattaagagcatattcctaaaccatacacttttgtttcaataaagttttattttgttgagatgaataaaataacaaagttataagctgcataagacaaaagttcaattgttcaaaaaaaatttactgggatagctttctattacaggtattgttagattatattgtgctgataagattactttctaaaaaatttgtacttttctgtaaattaaaagaatatggagtcataaaatggcaagtgttttaggattagcctaaaattggacattgtcattgatttcaaagaaggtatgaactagcagtcttacagcctaattcttctttggactggtccttggcagcagttccttttcagactcgataaacagaattcagatgatgtaagtcaaaacaaaactttacaaagccaagcgtattatcttttgcattaacctatttttttccatcatacatgctactagtatgtgcattagcatgatattctcatatacattgcattaaaaattaaaaggtggcagctcagggtgagctcttctgttgctcatttgttcctaaatttttaagggctttttctcagtcaatagtttgtacaaactggttagtttaacttcattacccatttcattaaagttgatgggtcgtgtgatgagatgcatttaaggccgatagtgatagatgttttttttatttcttgaacacaggctttgtctgaatgatgttcttttatctcttgaacacaagctttgaatgataactacaggttttaagtgctgttacattaataccataatgtgatgtgttagaaacaaagggatatttcaaaggtagatatttgaaaattctctagtctcaatatgtatgtgtattgaatatactctaaaaataaatgtgcaatttgctagtaggacaatgcagtgactgactagcattaggtatgtttcttttatatcctggctatgtcccactttcttctaagtgcaatcctttcatgttcacttgctgttttaccccatctactctaacttcatttggaaggcttgtctagagtatagcatgtatttttacctttgcagtgaattgcatgtgctaattgtaaccacagctatttttatgttgacataactccaaatgttatattaaatgttctattatatattagctctaatcccttaagtaaattttaagaaataaatacttgttcaaaaaaaaaaaaaaaaaaaaaggccacatgtgctcgagctgcag

SEQ ID NO: 171 - DNA, 2121 bp, Homo sapiens
  nbla-10120
ttctaggcctgtacggaagtgttacttctgctctaaaagctgcggaattcctcgagcactgttggcctactgggttactcagcgtagatgtgtgttcacacaaattgctctgcattcagtgttcattgtgaattgggagtgtgagtctttctgtagggtagaaagaagcctcctacccagcaaaccagtagacccaaaagttgaaaaaaactgatgacagacaacaagcatgaagatggcatatttgatgtcactttggttctttttcccagaaggcttatacagtgactcagtcgggaagctttccagcttccagcccttgaatgtgaagtgtcattggcatgtctggcagtagtctctcattcactcctcaataaacaacattgaatacaaaagaggcttgtgtaaaaactcagtactgtctggcttggattcatttcatgtttttaatataagaatgatctaatatttttttaaagtaatagctatcagtaatagctgagtgttttttcccctaatattttccttgtgcaattcagacttaagcatcgagtttttaccatcttccactttaagctaagttatgatacctattccattcacaattggtgttctttttaaggtttgcaaatttcagccaattttgtagctaagattgttctgatcagctcaaaaagatttggcttagtgttttcattgcaaattataattgctgtagagccacacacaacttttgaacttttaattataagtgttatggctaaagttatttactgaaaatttcagtaaaatgtgtgaatgtttctttatgtattaacctcatagcagtaaatgacttgctgttgtttaatttttctaaggcatcttaatagacttctgttgaaaacttcagtgttaacatttttatagtttgtactaaatttaaccgtgatataaaaatgaattttatgcatagatcagaattttaaattaaaggttttttctttaaatgatttgtattactttattaaaactaaatctgaaatggaatagaaaatagaatggattacatacagatggtttccttgttagcagatgcccttcaaatatattttacgtttgcagcacaacaccattgcccggaggcttccgaatctagcaaagcagcatattaaatgactccacctgcgcagtccttgtgttcagtggatgaatacctgtgggctcttgtaatgtgtggtaatatttggagctttatagcctgtattccttgggagaaaaaaatgggaattggagtaaaaagtgtgtcaagacaaccactttctgctttcttatgtagcatctgcaaagccgattcatgtactgatgccaatcagctagagcaatgtaggctttttttaatttaaattattactacactttattactacacttgcagaaaagaaacatgttaaaatcatggcacacctgcagaatttcagatgacagtgtggtcagaagatgttttttgggagaacctagtgtttgctgggcactatgctaagcactctgggagcaagaacctcctaccttccagtttaatgataaaagcagaaaagcaaagaggtaattggagttgaatcaagttaatagggaaggttggtagtaaatgctgttagtgtgacatgattctgaaacccagagctcagaactaactgtgagatgtaccatgaactaacaattctttgaaaggacctgcagaagcatttttaatacctcattctgtctatgcaagatgaaaatccatggagttttttcttggcttttgtaccaaatttaggggtcttgcatgtcagcaagtgatatatattgtttataaatgcaagctatttctggaggggaaaaatgtgtgtggctcttacgttttctgggaattttgtaacaagttacacgcacaagtgttagaaactttggcataactcaatttggagtattttttaaatgctgtatctttaaagaaaagtaaaattgtcttaaatctaattgacacttctgtaatgagaggcaaccttataactctggagttgtagtttgacagaaccatcagtaaagacataagcaaataaaaaaaaaaaaaaaaggccacatgtgctcgagctgcag

SEQ ID NO: 172 - DNA, 801 bp, Homo sapiens
  misc_feature (1)..(3): n is a, c, g, or t
  misc_feature (5)..(6): n is a, c, g, or t
  misc_feature (8)..(11): n is a, c, g, or t
  misc_feature (14)..(16): n is a, c, g, or t
  misc_feature (30)..(32): n is a, c, g, or t
  misc_feature (35)..(35): n is a, c, g, or t
  misc_feature (39)..(39): n is a, c, g, or t
  misc_feature (488)..(488): n is a, c, g, or t
  misc_feature (549)..(549): n is a, c, g, or t
  misc_feature (591)..(591): n is a, c, g, or t
  misc_feature (643)..(643): n is a, c, g, or t
  misc_feature (668)..(668): n is a, c, g, or t
  misc_feature (706)..(706): n is a, c, g, or t
  misc_feature (713)..(713): n is a, c, g, or t
  misc_feature (755)..(755): n is a, c, g, or t
  misc_feature (759)..(759): n is a, c, g, or t
  misc_feature (779)..(779): n is a, c, g, or t
  misc_feature (789)..(790): n is a, c, g, or t
  nbla-10130-f
nnngnngnnnnagnnngtgggggggggttnnnatntgantcctttgcactgttggcctactggcgtcttcagcaacctggacatggaggccgcactgcagccactgggccaggccaagagcttagaggaccttcgtgcccccaaagacctgagggagcagccagggacctttgactatcagaggctggatctgggcgggagtgagaggagccgcggggtgacagtggccttgaagcttacccacccgtacaacaagctctggagcctgggccaggacgacatggccatccccagcaagcccccagctgcctcccctgagaagccctcggccctgctcgggaactccctggccctgcctcgaaggccccagaaccgggacagcatcctgaaccccagtgacaaggaggaggtgcccacccctactctgggcagcatcaccatcccccggccccaaggcaggaagaccccagagctgggcatcgtgcctncaccgcccattccccgccggccaagctccaggctgccggcgccgacttggtgacgtctcanagcggctgcagacggatcgggacaggcgaacttgcctgagtncaaggcttctgcctggtgttgtccccaaggcccactgaactgttcaagccgntcaacccttgggcccggggcttgangcacgaacagtgacgccttgttggcctctggaccggtnagacaanctggtcaggcagaaccttccgtaaggcccgcaacccgatgtngcancccattaacccccaattaanttccccttgnngggaaccaccc

SEQ ID NO: 173 - DNA, 800 bp, Homo sapiens
  misc_feature (6)..(6): n is a, c, g, or t
  misc_feature (8)..(8): n is a, c, g, or t
  misc_feature (11)..(13): n is a, c, g, or t
  misc_feature (24)..(28): n is a, c, g, or t
  misc_feature (32)..(32): n is a, c, g, or t
  misc_feature (336)..(336): n is a, c, g, or t
  misc_feature (450)..(450): n is a, c, g, or t
  misc_feature (481)..(481): n is a, c, g, or t
  misc_feature (523)..(523): n is a, c, g, or t
  misc_feature (541)..(541): n is a, c, g, or t
  misc_feature (567)..(567): n is a, c, g, or t
  misc_feature (577)..(577): n is a, c, g, or t
  misc_feature (583)..(583): n is a, c, g, or t
  misc_feature (585)..(585): n is a, c, g, or t
  misc_feature (613)..(613): n is a, c, g, or t
  misc_feature (647)..(648): n is a, c, g, or t
  misc_feature (651)..(651): n is a, c, g, or t
  misc_feature (665)..(665): n is a, c, g, or t
  misc_feature (694)..(694): n is a, c, g, or t
  misc_feature (701)..(701): n is a, c, g, or t
  misc_feature (717)..(717): n is a, c, g, or t
  misc_feature (794)..(794): n is a, c, g, or t
  misc_feature (796)..(796): n is a, c, g, or t
  nbla-10130-r1
gagggngnttnnnttgtggctttnnnnnttgntttctttttttttttcttccccaagatgattttattgaatgcacacaaagttcatccttgggtttgcaaaaagtcccacaagtgaagaggcagcagtgctcatgtgaacatggagcgctcaccccagcccctcagcacagccagggggccttggggtacacaccctccttccctggggccgccagcacctcctctgccctatcccggatggggcctgggggtctgcccagggtgcgaaactggaatctatgctgaaacacctaagtgcccaggaggtgcccccatggcccaggagtgacacggntcccccagcagccagagcccattcctgagccagacaggtcacggttgacccaggaagagccatgtgccaggatggccgccaagcctactgagcatgtgcagcagtggcagcctntagacatagagggggctccctgggtgacatnttcagagacccccttgtccccagacacccctgggtagactgngtctgacctttacaaatnggaaatgagaacttgggtcgaaaagnttacaatttnctgggngncttaaaagggtggtttcttaaaagggcnggccatactttaactgggttatgggaatgaatcnnttnaagaattatcaaantaattagggaaaaagggaaaagaaagatnttaaccnttaatctaactttggngaccttggcctaagaaattctgggctggcctggaactttggcaagttggggaggacttgggttttaaccttcttctngnttcc

SEQ ID NO: 174 - DNA, 1698 bp, Homo sapiens
  nbla-10143
gcctgtacggaagtgttacttctgctctaaaagctgcggaattcctcgagcactgttggcctactggagtcgtttatgctccactttcaaagaagcaggagatcttttatacagccattgtgaaccgtacaattgcaaacatgtttggatccagtgagaaagaaacaattgagttaagtcctactggtcgaccaaaacgacgaactagaaaatcaataaattacagcaaaatagatgatttccctaatgaattggaaaaactgatcagtcaaatacagccagaggtggaccgagaaagagctgttgtggaagtgaatatccctgtagaatctgaagttaatctgaagctgcagaatataatgatgctacttcgtaaatgttgtaatcatccatatttgattgaatatcctatagaccctgttacacaagaatttaagatcgatgaagaattggtaacaaattctgggaagttcttgattttggatcgaatgctgccagaactaaaaaaaagaggtcacaaggtgctgcttttttcacaaatgacaagcatgttggacattttgatggattactgccatctcagagatttcaacttcagcaggcttgatgggtccatgtcttactcagagagagaaaaaaacatgcacagcttcaacacggatccagaggtgtttatcttcttagtgagtacacgagctggtggcctgggcattaatctgactgcagcagatacagttatcatttatgatagtgattggaacccccagtcggatcctcaggcccaggatagatgtcatagaattggtcagacaaagccagttgttgtttatcgccttgttacagcaaatactatcgatcagaaaattgtggaaagagcagctgctaaaaggaaactggaaaagttgatcatccataaaaatcatttcaaaggtggtcagtctggattaaatctgtctaagaatttcttagatcctaaggaattaatggaattattaaaatctagagattatgaaagggaaataaaaggatcaagagagaaggtcattagtgataaagatctagagttgttgttagatcgaagtgatcttattgatcaaatgaatgcttcaggaccaattaaagagaagatggggatattcaagatattagaaaattctgaagattccagtcctgaatgtttgttttaaagtggagctcaagaatagcttttaaaagttcttatttacatctagtgatttccctgtattgggtttgaaatactgattgtccacttcaccttttttattatatcagttgacatgtaactagtaccatgcgtacttaaatagatggtaattttctgagccttaccaagaacaaagaagtatccatattaagtttagattttcagttaatttttgagactgagtagtattcttggatacaggctgatgtgtacttaaccacttccagatttatacagtcttcctgtggaagtttagtaaatgtctttttccctcctttcttctagtaatgcagttcatgggctttaggtacttcagttatgaagtaggcttttcatggggagagattgggattatgctttctgttgtttaagaaactgtttgattttagagtctatttctatgagatagtttaccaaataaatgttccttataaaaaaaaaaaaaaaaaaaggccacatgtgctcgagctgca

SEQ ID NO: 175 - DNA, 793 bp, Homo sapiens
  misc_feature (2)..(6): n is a, c, g, or t
  misc_feature (8)..(15): n is a, c, g, or t
  misc_feature (17)..(17): n is a, c, g, or t
  misc_feature (24)..(24): n is a, c, g, or t
  misc_feature (27)..(29): n is a, c, g, or t
  misc_feature (657)..(657): n is a, c, g, or t
  misc_feature (670)..(670): n is a, c, g, or t
  misc_feature (677)..(677): n is a, c, g, or t
  misc_feature (686)..(686): n is a, c, g, or t
  misc_feature (688)..(688): n is a, c, g, or t
  misc_feature (691)..(691): n is a, c, g, or t
  misc_feature (713)..(713): n is a, c, g, or t
  misc_feature (757)..(757): n is a, c, g, or t
  misc_feature (774)..(774): n is a, c, g, or t
  nbla-10198-f
gnnnnngnnnnnnnntngggggcnttnnnatttgattcctttgcactgttggcctactggtcattttgttttggacaccgagcaggagctggcggccgctgcagacgaaaggcaggaaagggcaggccgggtgagcagacggatcggccgactagacagccaaccagcaacaacgaactgagctcgcatactaccgcttacgcatctaaccaaccgcccatctagctaacccgagcccctccaccgtcaactcaggttcggccggtccccggcccgcctgccggagccgtggtggcagccccgggaggagcactggcgtctgtttccttcgattctcgggattcgaagatggctgcacagtcagcgccgaaagttgtgctaaaaagcaccaccaagatgtctctaaatgagcgctttactaatatgctgaagaacaaacagccgacgccagtgaatattcgggcttcgatgcagcaacaacagcagctagccagtgccagaaacagaagactggccagcagatggagaatagaccctctgtccaggcagcattaaaacttaagcagagcttaaagcagcgcctgggtaagagtaacatccaggcacggttaggccgacccataggggccctggccaggggagcaatcggaggacgangcctaccataatncagaaangcttgccanangangactacgtgggggacgtgccancagaaccctacttaagggccgggatgtcatttcgaggtcaaaanctgttccgaggtggacnagccgtacttcccgaatgg

SEQ ID NO: 176 - DNA, 784 bp, Homo sapiens
  misc_feature (4)..(4): n is a, c, g, or t
  misc_feature (9)..(9): n is a, c, g, or t
  misc_feature (12)..(13): n is a, c, g, or t
  misc_feature (18)..(19): n is a, c, g, or t
  misc_feature (25)..(27): n is a, c, g, or t
  misc_feature (33)..(34): n is a, c, g, or t
  misc_feature (38)..(38): n is a, c, g, or t
  misc_feature (641)..(641): n is a, c, g, or t
  misc_feature (649)..(649): n is a, c, g, or t
  misc_feature (714)..(714): n is a, c, g, or t
  misc_feature (722)..(722): n is a, c, g, or t
  misc_feature (752)..(752): n is a, c, g, or t
  misc_feature (762)..(762): n is a, c, g, or t
  misc_feature (768)..(769): n is a, c, g, or t
  misc_feature (775)..(775): n is a, c, g, or t
  nbla-10198-r1
gagnggggntgnnttggnngccttnnnttgacnncctnagcgaacagcttgttataatgaaccagaaatacaagattccactgaaactgaacagttgacagaatatggttgaacttaaaccttcaagggaaacaagggcaaaacaaagctaatgagtggaaaagtccaagattagtttgggataaacatgaggatataattgcattttagcatggctatcttctgacctcttccagcagttcgtctgccatcattctcccttctgacacacctaccaaatcaaatggcttctgatcctctatattgcagtataaaccaaccctatagtacccctctggtcatgatacaaacccagaaggaaagtctgtaaatctcatacaaaggtagaaagtgcaattcaacccaacacgctggttatggtatatgtgctgtcaatgtacatggtagcaacttgaatcaaaccagagctgctaccacatgtaagcaacctcttatgctgccctgtagtgatgtcaatgttctcagtttactaaattatcaatgtggaagaacgcatttttgagctccagaccttctaaacattttaaacaggctatcgaagaggatgtaacagaaccctatttcagaaacctaaggatcanggaggaangaacactgaccgggttttctgggatggttctgtgggggcacagggatgaacaaaagaaatggtancatgtcanaacatttgcaagtgaaggggagccgaagtnggaaaagggngtctanncccaanggccatgct

SEQ ID NO: 177 - DNA, 1880 bp, Homo sapiens
  nbla-10236
gtacggaagtgttacttctgctctaaaagctgcggaattcctcgagcactgttggcctactggaagatgcacatgttgcaaaggggaagagtgttttccttgagcaaatgaaaaagtttgtagaatggctcaaaaatgctgaagaagaatctgaatctgaagctgaagaaggtgactgaattttgaaactacaccctcagtaaagcaaacaggagttgtagataaaatgtcatgtctcatgtgtcctggttcttacatcttcctacctccctgtatcaagcatgatataagggctttcatggcaaattttattttaactgtttctatggttgctggaaatgttgggtttagtttctaaaaccatgttttaagtagctacaggagctatagatttgaatctaatgttgcattagtcttttcagttatcttctacctcctgtattttctactgtaataatgtaatttaaggccttccacaatgaacagttcactttattccctgggttttctataaacagttttaaggatatgatttggttaaaaaataatttgttataaaaattctgtttgcaaattaaactggaaaagtatccagagtctcaaaaggcaatgatttgtgagataatatggcatgcccggagccctgctcatcaatgaaaaacccatatgtaataatcgaattcatttaacatgaatcttgagtacgtggaccattgcttgcatgttaactttttgttttgttttgttttgttttgttttgcatttttaactccagatatcctaaagctcaattgtttggtctctggttttcatccttagagaagccatggagaacagacttgaaaagtttaggaaatcataatgtggcagaggtggtgggaagaagaaagttgagctttttccccttgagaaacttctgcatttagtttctatctttccaggcaaaacaaatgggtattcttttcatacaaccattttcaaatgaaccttagaaaagtcttaacatttaaggtattttatgcacagaatacacttagattgataggaaagaactcgtaatggagtttgagtaaagaaaatgactgatgtactaaacccagtaaaaattgttgaaaatgttaaaggtcagcatgttctaattgggaatctagatatagcttagatttcctattggcttagagtatttgctataacaaatgaagtgcaatgacaattatatattcctactcggtcatactggactggcttcgttctcttaatatactcagtaatgactcaagcctctggctattaacataccctagttgccgttttttaattgccatgagccaaatacttcttggtatacaattgatccatttattttaatggctgccttttcattttcatcttttcttgctgctacccatctatgtatgtagtcattggggggaaaatgtagccacattttttatgggaagactttgtgttaaaagtgaacattttgaaggtttttaactggtgaaactagcctggaataatgccaccagagactgagtggaaatcgccccttttgaaggtgccattcttatgagccaaaagtttgtcatttaaaagttcattttgagggaataacatgtaatataatttgaaataaaggtatagtaaccttaaaaagaacattataactgattgttgtgaatggggtgaatttgttaaaatgagtaactttgataaagtttttcatgcacaggcaaaatgtattcactagatttctacgtagtgatctgcttttactttgtaatttgtagttctcaaaagacttttttttaaaaaaataaagtccatacttacacttaaaaaaaaaaaaaaaaaaaaggccacatgtgctcgagctgcag

SEQ ID NO: 178 - DNA, 2075 bp, Homo sapiens
  nbla-10241
gtacggaagtgttacttctgctctaaaagctgcggaattcctcgagcactgttggcctactgggatagtgttaaatgagatcactggatcctgctaaacatgttctagtgctcttgccttttgctgtatgtttggtgtcattcatcagcagggaatggctgaaatgtgaggtgtaaattgacagagtagagagaacctatacagttttaacaccatagccacagacatccaggcatcctaacattttgtcctagatcttcctgaacctggacggcaggatgagaacactagtgattttattggaatgaagccaagacaaataacctttttttgtgctctttataatatagctctcaagaatgaacaaataaaaagaatggggtcaccatatatatcattgtttagcaagtgacaagtgacacagtgagcaatccttagtcagtggcatgacaaggaaatactcaagacagacactgacctgtattgtgaatgaggtgccttggtgaagcaaaggtttgggcccaatagtgagtcaaggagccatttcaaagatgggctacagtcactcattaaaagggatagaacacaactgtgctgatcgtagaattaactgtgacttgtccataaaatagagggaggatgcaatctgttttatagaaggcatatcttgcagggccttgtagatttgttaaggatagatgatagtcagcaggctgaaattttctctctagtggaccactttgacacattctcaaggttttatttgtatacattaccacaagacatggacttcagttacaatggcagcaaatataatacatgctactaactatgaatttttaggtaagatgaaatgcttcttaaaagattgttggtcagaaatctggagattggtactttttctcagaaagaaaatcagctcaacctaatggctgtatactgcattgtaacatttatttttatttaaaagttggatttttatgatttaaaaaagtaatgtgagtcttcatttaaaagtttaaatggcataaagacagcaagttttcatatagtagtaaaattgtatgaattttagacaatgattgatggcctctcttgactgtatcttaaacaaaaggacttactgcaattttttcattatcagtgttatgcaaatataccagtaaacgactgctttctgagatcttagggaagtaatgattaatgaagtataaaaatgtaattgtaattatatcacctaaattatgccaaagagatacattggtgacatacttatgctaaaaagagagagagaaaaaaagactccctctctccccaaatcttacaacacattaaatctgtcttctgttgcatgttgaatataacagtatcaggaactagatgaaagttggttattcatttatgatgatgatgaggctgctgaagcagttggtatagttttgtgcattacagagaatgttgtatgccagttaacaaatagacagccactatgtgcccagcacagagagaaatgagtcatggtttgtgacctccatggatcctaacatttcttctcattaattccttcacttggtatttactgaatgccagtatgtaccaaatattgagcatgacactgggaataagggtgtccagaagacaaaatctttttcttgatggagttgacggtttaatggagtcatggcataagcttccgaaacagttgaaggatgagtaatacacagaaaattgtcaggagaaaattatgtggggtataaccattgcactagattgttttgtagaggagacagattggcactgaactttgtggctaatattttagaccatgagataggaaatgtattcaaaaggctgaaaattacatgggagagagtaaatatgatcagagatttaacccataggctgttacctggagaatgcttgggtatacattgacttataactaagaaagatgaatttcaattttctgcttaggtatgctgaagaaaaattaaaagtgtaactccagagaagtaagttcagaaagttagcaaaaaaaaaaaaaaaaaaaaaggccacatgtgctcgagctgcag

SEQ ID NO: 179 - DNA, 1754 bp, Homo sapiens
  nbla-10242
gcctgtacggaagtgttacttctgctctaaaagctgcggaattcctcgagcactgtggccttttttttttttttttttttttagacaaggtctcactttatcacccagctggagtgcagtggtgcaatcatgacttgctacagcctcgacccccaagggctcaggtggatcctcccatctcagcctccccagtagctgggaccataggcgtgccccaccacacctggctaatttttgtattttttgtagagacagggtttcaccatgttgcccagaccggtcttgaactcctagactcaagcaatcctcctggctcagcctcccaaagtgctgggattacaggcgtgagtcaccacacccacccaagaattttaatttatgtggactacgcttacaccttgctgccctttgattttcttccaaacagcaatgtttaatcattttcttgctctcataggactaggttaacttaaactgactcattcactgatacagggcctacagcaggaagcccaggacctcccacccctcaaagcctttttctggcaagactgtccaaagcccctttgtcacgaactcaccttccaggcatggtatgtgcccgaggggtcagtctgatagagcctaggagtgccatcaaagtcgaaacccacgatgagggcagagatgccaaacggcctgcgcccattgctctgcgtataacgctagcaagaaaagaaacaggtcagtgccatccaattaagaaactgcatgtgaggaaagaaccgtacttagtgaagatacgaacattttaaaccatgcctgagccccttctcaggttatcagcagttcaaatgatacattagccaatagctttcaacatccttttctgcattttcactcctagaaaaactcacctaggaccagaattgtgaactcaggttactggaaattactttgacaggtagacacacattctgcttacatactaatggcatgtcctcatagggtggcttccagcccccttcaactgctttgtgactggtcactcaggatggcaagacaaaagctatcatttccctccagacacaggaatttggaatatcccatgccaggaactgagaacagaacaatgttactgaaattggtgagctaggtcaagttacacttgtgcaagtcaagattaggatcacgccccagaataaatcagttttctgattcacctgaagtgacatggcaggaccctccatggcggagccgtgactgccctgctgccagaggtgagcatgcaagcgggcaggcacccacctgcttcagactggcgatgtagcgggtgatgtactccacagtgaccgggtcctccacagtcagccggtggctctggcactccacccgggccctgttgatgactatccttgcatcggcggtgaggcctgcaaggaaagcagagaggcttctgctagagagacagcacaaactacagggtggggacagacacgatgacccagcatttaaccttccacagaccccccaaaccggcagcaaggctattctaactgactggcagcggaacctatcagcccctgggaacttccaggaaattgggtacagatgcttcttgatgtgcagtggggtggtatcccgctaaactcatcgtaagtcaaaaatacctggctgaaaatgcatttactaccccataaacccattgtaaataaaaaattgtaggctgccgtgcaaaaaaaaaaaaaaaaaggccacatgtgctcgagctgcag

SEQ ID NO: 180 - DNA, 1668 bp, Homo sapiens
  nbla-10283
gtacggaagtgttacttctgctctaaaagctgcggaattcctcgagcactgttggcctactggctgtgtgaatcctgtacaccctgggttggctgcagttttcctttcaatctcgtggatgctgtgtccttcttacttggtttttcccaggcagccctttcctgtagagccagtatgaggtagccaggttctcagctgtttcgagtgctttgccttctctggttatctcaagcatcaggaaaattatatgttgcatacattccacagaggtcccatggtgatggggaaaggtcagctcaggcattccctctgcttagccacacttcatcatactgcttggatacatgttgctgcctaggagactttcttaacccaaacaggccccactgcctttagcagtttcttcatcttctctgacatacaattcagctttggcccagagtggagattaagatatgggtctgactctgcctctcttttccctgtgtgactgctccagttgctcctaactgaatgccctgtagctcccaagcttgcaggctctgccatgggatgcctgggaaagtaaggcacttgtactcttccatttttgtctggatgataccagtgtctgcctcttctcccattattcatgtaaatgcaagagaaaaaaagcactttaataattttcaaaaatttctcatattacattctctattgtgtctggctctgaagttaggtttttgtgtttttttcccacaattattcctactgtatgtccttgctgcaatccaagtgctgaccttatttttttagagctcgttctttctaaagttaaactttactatgcatagaagtaattttgaatctttcaaaatgcagattctcattgagtaggtctggggtggggcctgagattctgcatttctcataggctcccggggtgcttgtattgctgagccacagtccagtccatctcagagtcctagaggaggtaatcttctctggttcttttccatttatccatttcataagcatttctcacatcttatctggcctttgccacattcatgaaacctatcactttatcagtaaggtatttaaaacactgccttgcacagagtaaacattcatcatgttctagatattcacatgtacatgaacacacacatatctatcacacttaatattattgctgttttatagttaaacttcttctaatgtcaatctagaaacttgttttagtagtgcattttgagagaaaccatttggtatcatcttgcatggaaacatccgcttccttaggaatgaccaaaaactataattagtgataatgaatcttttatgatttggcaagagtgttttaagtggagttcttttgatgatacgattgttcaggtcaggctgaaggagccccaataataatgtttttctgactgttttcctctggtaatgtttgtgataaaattcctttgtcataaataaatattgttgctggtgcagactgaatatttgtattcccccaaaattcacatgtcgaaaccctaacccccaatgtgatagggtttggagatggggcttttgggaagtaattaaggttagattaggtaatgagggctggtccttcatgatgagattggtatccttattaaaaaaaaaaaaaaaaggccacatgtgctcgagctgcag

SEQ ID NO: 181 - DNA, 2161 bp, Homo sapiens
  nbla-10300
gtacggaagtgttacttctgctctaaaagctgcggaattcctcgagcactgttggcctactggccatattgctgctctcattgcagagtatctgaaaagaaagggttactggaaagtggaaaagatttgcacagcatccctgctctcggaggatacccacccctgtgatagcaactcattactaacaactcccagtggaggaagcatgttctctatgggatggccagcttttttgagcattacaccaaacattaaggaagaaggagcgatgaaagaggattctggaatgcaagatacaccatacaatgagaatatcctggtggagcagctatacatgtgtgtggagtttctctggaagtctgagcgatatgaactcattgctgatgtcaacaagcccatcattgctgtctttgagaaacaacgagacttcaaaaaattgtcagatctctactacgacattcatcggtcatatctgaaagtggcagaggtggtgaattcggagaagcggctgtttggtcgctactatcgtgtggcattttatgggcagggcttttttgaagaagaagaaggtaaagagtatatttataaagagcctaagctgacaggtctgtccgagatttcccaaagattactcaagctctatgcagataaatttggagcagacaatgtgaagataatccaggattccaacaaggtaaaccccaaggatttggaccccaaatatgcctacatccaggtgacctatgtgacgccgttctttgaggaaaaggaaatcgaagaccggaagacagatttcgaaatgcaccacaacatcaaccgctttgtcttcgagacacccttcacgctgtcgggcaagaagcacggtggggtggcggagcagtgcaagcggcggacgatcctgacaacgagtcacctgttcccctacgtgaagaagagaatacaagtaattagccaatcgagcacagaactgaatccaattgaagtggcaattgacgagatgtccaagaaggtttctgagcttaatcagctttgcacaatggaagaagtggacatgatcagactgcagctcaaactgcaaggaagtgtcagcgtgaaggttaatgctgggccaatggcctatgcacgagcttttcttgaagaaaccaatgcaaagaagtaccctgacaaccaagtaaagcttttgaaggagatcttcaggcaatttgcagatgcatgtgggcaggcccttgacgtgaatgagcgcctcatcaaagaggaccagctggagtaccaggaagaactgaggtcccactacaaggacatgctcagcgaactctccacagtcatgaatgagcagattacgggcagggacgacctgtcaaagcgcggagtggaccaaacctgcactcgagtaattagcaaagcaactccggccctacccacggtctccatctcatctagtgctgaagtctgaggactctgcagcatcagacccacctctaagagaactttctgaatttgcagctaatctcggggaagagaaagataggtttaatttatttgaagttttcatggtgttaatatttttgtttacctcgctagcttcagaattttgccaacctctgaatttgcacattttgtataattttttttttctttgagcagtgttgatcaagccaagttgaatatttgccatgaaattccagtgaatgtgtagctcaaatgcaaaccctaagtttgctgtcagttattgtatggtcagtaccccagtcctagtacacatattttaaaggttaaagtgaatgtttttgtaacatttaagcatatttcagatgtaaataaaagattgtaaaatatacggtttttaccaaatttaaaagatcctttttagttaatactatgacagtactaaaaatatatgaataacatttcagataccattatattaaaatatttgtgtatgtgtacaaaagcgttgataaatactaatctttaaagtttgtggagttcctttatttgtaatatatgtgctcttaaaagcaatgggatgtgaaattatgaaagtattttattgttcatagaaataaaaaacacagttactttgcaaaaaaaaaaaaaaaaaaaaaaaaaaaaaaaaaaaaaaaaaaaaaaaaaaaaaaggccacatgtgctcgagctgcag

SEQ ID NO: 182 - DNA, 777 bp, Homo sapiens
  misc_feature (2)..(2): n is a, c, g, or t
  misc_feature (4)..(6): n is a, c, g, or t
  misc_feature (13)..(19): n is a, c, g, or t
  misc_feature (26)..(26): n is a, c, g, or t
  misc_feature (32)..(32): n is a, c, g, or t
  misc_feature (535)..(535): n is a, c, g, or t
  misc_feature (618)..(618): n is a, c, g, or t
  misc_feature (626)..(626): n is a, c, g, or t
  misc_feature (628)..(628): n is a, c, g, or t
  misc_feature (636)..(636): n is a, c, g, or t
  misc_feature (699)..(699): n is a, c, g, or t
  misc_feature (707)..(707): n is a, c, g, or t
  misc_feature (728)..(728): n is a, c, g, or t
  misc_feature (747)..(747): n is a, c, g, or t
  nbla-10313-f
gngnnngtggggnnnnnnntttggantcctcnagcctgttggcctactggagatgtttggataaatactaaaaaagcaaaaaacaaaaacaaagattaacagtgcatgtcagagatagctgaggagagaacagctgaagaatttagttagatagaaagccaagttatgggcctataaagctggaattcaagatatggaaaccagaagggcagaacaatgatgcagaactgtataacaaaataaggcattggagtctttcttgtattctctttgtatcttagatgcctcagcctccaatgctgcttgctgttacaacatagaaaaacattggagtgattttagagatgatttttttgtgaatatgtcagtaaagtttgtgttgactgttggtaacattgttcatctactgaagcactctaataataagaaaagtgaattggagcttgaaaaaattgctgtgacattggaagaagagagaatgtaaatgaaggggttaattcttgctgccactttcttctggtgttgctgatgcctnaatcattcactcaagaaaatggttactaaagtacctcttatggtttggacattaaactgggtacaaaaggatgtagaagttgnacttgcananccgcgccngaagaaaccacgcactgactttggcttctcggacgactgtacagaagtcttcaaagccttctnttttctgngcaaaaatggcaactcttaanggaaaactcattggaccanttgcgggaagaagaagcaacaagttccaac

SEQ ID NO: 183 - DNA, 788 bp, Homo sapiens
  misc_feature (2)..(2): n is a, c, g, or t
  misc_feature (5)..(5): n is a, c, g, or t
  misc_feature (11)..(12): n is a, c, g, or t
  misc_feature (19)..(19): n is a, c, g, or t
  misc_feature (31)..(31): n is a, c, g, or t
  misc_feature (33)..(35): n is a, c, g, or t
  misc_feature (38)..(38): n is a, c, g, or t
  misc_feature (559)..(559): n is a, c, g, or t
  misc_feature (639)..(639): n is a, c, g, or t
  misc_feature (684)..(684): n is a, c, g, or t
  misc_feature (690)..(690): n is a, c, g, or t
  misc_feature (697)..(697): n is a, c, g, or t
  misc_feature (721)..(721): n is a, c, g, or t
  misc_feature (727)..(727): n is a, c, g, or t
  misc_feature (737)..(737): n is a, c, g, or t
  misc_feature (742)..(742): n is a, c, g, or t
  misc_feature (747)..(747): n is a, c, g, or t
  misc_feature (755)..(755): n is a, c, g, or t
  nbla-10313-r1
gntgngggttnnatttganggccctttgttngnnnccnttttacactacaatagttaattttatttgttcaagagctcagattgcaagcattaaaccaagcataggctttgattctgtgagcccaaattcacatattgaagaagatcaaagcaaactgtgatccatgtacatggatgaaaactaaaggctcgagttaatcacattgtagtttttaaatttctacagcctagagctcactagtcacaggtcttttaggtccttctggatgtcccacagggtatctgcacttttcttgagctgagcaacctcatcatcctttagcttctggttgataacgctggttaatccccgggcattgaggatacatggaaggctcaggaagacttcattctcaatgccatacatcccctttaccattgttgacacgggatgaatcctggatagatttttcaacatggattcaataagatcagccacacttaatccaatagcccagttggtatatccttttaacttgatgacttcataggcactttcaaccaccatcttatgcacttnctttcaattttcactatcattggcaggtcccatttctggattcaattcctggagagaaacacctggcacattcacaccanttcaaacaggcacactttgagtcggcatgttccccaaaatccatncatggnaagcttnttgggatgaatggccaagtttttnaagccntaaggaacgnaaatntagcngaatccanattacattcactttcaatacgccgggggttggg

SEQ ID NO: 184 - DNA, 2324 bp, Homo sapiens
  nbla-10314
ctgtacggaagtgttacttctgctctaaaagctgcggaattcctcgagcactgttggcctactgggatattcaaaaatccatggctgccttcaaaaacctttcagcccaatgtcaagaagtccggaagaggaaagagcttgagctgcagatcctgacggaagccatccggaactgggagggcgatgacattaaaactctgggcaacgtcacttacatgtcccaggtcctgattcagtgtgccggaagtgaggaaaagaatgaaagatatcttctactcttcccaaatgttttgctaatgttgtctgccagtcctaggatgagtggctttatctatcagggaaagcttccaacgacaggaatgacaatcacaaagcttgaggacagtgaaaatcatagaaatgcatttgaaatatcagggagcatgattgagcggatattagtgtcgtgcaacaaccagcaggatctgcaggaatgggtggagcacctacagaagcaaacgaaggtcacgtctgtgggaaaccccaccataaagcctcattcagtgccatctcataccctcccctcccacccggtcactccgtccagcaagcacgcagacagcaagcccgcgccgctgacgcccgcctaccacacgctgccccacccctcccaccacggcaccccgcacaccaccatcaactggggacccctggagcctccgaaaacacccaagccctggagcctgagctgcctgcggcccgcgcctcccctccggccctcagctgctctctgctacaaggaggatcttagtaagagccctaagaccatgaaaaagctgctgcccaagcgcaaacctgaacggaagccttcagatgaggagttcgcgtcccggaaaagcacagctgctttggaagaagatgctcagattctgaaagtcattgaagcttactgcaccagcgccaaaacaaggcaaacactcaattcaacatggcaaggcactgacctgatgcataatcacgtcttggctgatgatgaccaaccaagcctagactccctggggcgtcgcagtagcctttctcgtttggagccttcagacctctcggaagactctgactatgacagtatatggacagcccatagttacagaatgggttctacatctcgtaagagctgttgctcatatatctctcaccagaactaatgcacttctgagcttttcttaacaaatgcttgttgtatcgcagcctgcttttcttagatgttttcttgctgttccttgtctcttttatgtgatattttaacaacttttgagagtgttcctgatatttcccattgtactttgtggaggcttaactgccgatgcgagtatacattcgaatgactgactgttggagggaggtggtgtgttcacgtgagcctacatctgagggtgctcttcgtaaggggtagttgttgttttatagctccaaatggtttttttattctcagtgtagcaactgtttgatttctttctggatacagctgtatgaacacttttctattttatactgaaatcacacaggtttgtgatctaagtgccagaaccatggaggagactctggccttatctgtagggacctaaattttttaagtgctatgaacactgatcaagtagttgtggagagatgagaagaatatatgcagcaaaggtgctgtgagcccagttccaacggctgtgttctggtaatcgtgcagaacagcatgtgggctctgggccttggcaggtgcacagacgggcgggcgtcacgtgtgttcagagcttgtctccacctcacggctctgtgctcttctgtgtgctgcgttgtggccgtgaagtgggagctctcctttccaaaggcagagcttactgtcatggctcagatgttcactcgcatcttcaccccaaacttccctgaattgcagtgatttctgttataaggcacatagcaagcctgtaccactctacagtaaaatctctacactaacagtttaaagcccgaaagctgaagcattcagcctctgcaagtgtagactactggactgtagtagaggcatttggaatacttacaaagtcaagtgctgtggcttcagttcccccggctccccacccctgacatccatacttatgttgtctggaagagccatggacacatcattattttcagcaaccagctgcagtgaaactccatttacagcaaccccatagtataaaaccacaatgcctcattgcaatgggatattgaagttcattgaagaattactaggttgccatgtggctcacttatttaaaaaaaaaaaaaaaaaggccacatgtgctcgagctgca

SEQ ID NO: 185 - DNA, 783 bp, Homo sapiens
  misc_feature (2)..(2): n is a, c, g, or t
  misc_feature (5)..(9): n is a, c, g, or t
  misc_feature (16)..(16): n is a, c, g, or t
  misc_feature (19)..(21): n is a, c, g, or t
  misc_feature (26)..(27): n is a, c, g, or t
  misc_feature (496)..(496): n is a, c, g, or t
  misc_feature (546)..(546): n is a, c, g, or t
  misc_feature (572)..(572): n is a, c, g, or t
  misc_feature (602)..(602): n is a, c, g, or t
  misc_feature (634)..(634): n is a, c, g, or t
  misc_feature (666)..(666): n is a, c, g, or t
  misc_feature (697)..(697): n is a, c, g, or t
  misc_feature (730)..(730): n is a, c, g, or t
  misc_feature (739)..(740): n is a, c, g, or t
  misc_feature (751)..(751): n is a, c, g, or t
  misc_feature (753)..(753): n is a, c, g, or t
  misc_feature (765)..(766): n is a, c, g, or t
  misc_feature (776)..(778): n is a, c, g, or t
  nbla-10327-f
gnggnnnnngttgggntcnnnttganncctttgcactgttggcctactggttacgatgcagctgatgaagagggagaaaggggtgttggtggctttgcccaaatccaaatggatgaatgtagaccatcccattcatctaggagatgaacagcacagccagtactccaagttgctgctggcctctaaggagcaggtgctgcaccgggtagttctggaggagaaagtagcactagagcagcagctggcagaggagaagcacactcccgagtcctgctttattgaggcagctatccaggagctcaagactcgggaagaggctctgtcgggattggccggaagcagaagggaggtcactggtgttgtggctgctctggaacaactggtgctgatggctcccttggcgaaggagtctgtttttcaacccaggaagagtttgctgcaacagggtgtgctggagtatctgtctgccttcgatgaagaaaccacggaagtttgntctctggacactccttctagacctcttgctctcctctggtagaagaggangaagcagtgtctgaaccaaacctgangggttgccagagcctgtgatgacttggagntagcagatgacaatcttaaagaaggggaccantttgcactgagtccagccagcaggaacccatnaaccaagtcaagctttacacgccttaacaanttttccttggtactacttttaccaaaccggaanatggacagnntatggtcctgnanccctgggaatgnncccttgctcnnnccgga

SEQ ID NO: 186 - DNA, 775 bp, Homo sapiens
  misc_feature (2)..(4): n is a, c, g, or t
  misc_feature (6)..(7): n is a, c, g, or t
  misc_feature (9)..(9): n is a, c, g, or t
  misc_feature (12)..(14): n is a, c, g, or t
  misc_feature (18)..(18): n is a, c, g, or t
  misc_feature (29)..(33): n is a, c, g, or t
  misc_feature (36)..(36): n is a, c, g, or t
  misc_feature (617)..(617): n is a, c, g, or t
  misc_feature (624)..(624): n is a, c, g, or t
  misc_feature (643)..(643): n is a, c, g, or t
  misc_feature (677)..(677): n is a, c, g, or t
  misc_feature (679)..(679): n is a, c, g, or t
  misc_feature (726)..(726): n is a, c, g, or t
  misc_feature (730)..(730): n is a, c, g, or t
  misc_feature (734)..(734): n is a, c, g, or t
  misc_feature (741)..(741): n is a, c, g, or t
  misc_feature (759)..(760): n is a, c, g, or t
  nbla-10327-r1
gnnngnngnttnnnttgntgccctttttnnnnnccntttcctcctttctcttcagagaggggatctgaagtagctggtgtgtccagtttcatgaaggctgcttcaatagcttggctgaaggaattttgaaaactgggcacaggaacacggtctgaattatcactctccccgtcgctgtccacaggggcaggaggaactaagctgttctcatctttctttggagcagttttgggccacacatctgcttttgcttttccaaccctcagcatctgggcaaaggaagggaagggagagtcttcttccagactcccaacgcagaatgagggactgccctgactggcagtgggtgacagaggggtcagcagaaagtctgcatgggaacctggacttctgctgagaggagaaatggagagggccccatggccctcggtgctggtgggacccaaagcagaatcagaggagcaggtataagaattgaaggcaggaaactgctgtagattctcgaggggaatgtggacttctgggtacttgccctgtttcttgtctcctctatctcaatcctgcgctctcggcggccgttcctccgagccttcttttggcgctgaccgtttcccttntcaatgncatctgagaacatctctangggttccttaaagaccacaggaggttgcaagccngntcacagatctgaactcacaggtgaatgcaagtgaaagagatatctgngacnctgncaacatncttaaacatggggtaccnncaatttcaccccagt

SEQ ID NO: 187 - DNA, 2671 bp, Homo sapiens
  nbla-10329
gcctgtacggaagtgttacttctgctctaaaagctgcggaattcctcgagcactgttggcctactggcttttgatgagtccttttccctgcacggagcttctggtgaaggtggtgggagttgttcttgcagagcacatgggagtccaacggcctggcagtgggccaggatcttgttgccatggtgactgacactgttttcgctgaaattttgccagatcctgaagatcttcgtggacaatctctttgctatcgtcctgctgaagcaggccacagctgtgcgctgcttggacatgagtgcctcccgtaagaagctggccgtggtagatgaaaatgacacttgcctggtgtatgacatcgacaccaaggagctgctttttcaggaaccaaacgccaacagtgtggcctggaacacccagtgtgaggacatgctctgcttctcgggaggaggcaacctcaacatcaaagccagcatcttccctgtgcactggcagaagctgcagggctttgtggtcggctacaatggctccaagatcttctgcctccacgtcttcatttctgccgtggaggtgccacaggtaactgggagcacctgtccactctcagcactggcaaggccagtaagaccagggaagccgggcccctggctggtgctttgaggagagagtagcaaggagagaagaatggcagctgtgatgtcgtgggaggcagtctgggcttggaacctgcagccctatctccactccttgcaacctgtgtgactgggggcaaggagctcaacctccctgtgcctcaatttcttcctggtcccccttctggtaaggattcagaggggtatacagtgttgtcagcagagtgtattttacagagagcccagtgtgggccaagtggagagagcagcaaagccgggagtccagcagggtgtgtgtgtgtgagcacatgtgtgatggtggtgatgtgtgtgtgagagagggggaagagagagagaatgagtgggtggggggggtgaggcctgaggtctgtgagccaataagggagcatgggactctgcacaagccccctgaactaggaggtggccacagcagaaatggggcactgaagtgtggagccacagaatgcgggagggcagaaccacagacaggaggctgagattgacctcctgagtgcaagctggtctccccttcacctcctgcaccccacgcagatggtgcttaccataggattgccgtaaaacagagacacgcaccagcgagaaactttagcccttagtatcccatcctcaggacagaatcactcttaaacatgttgaaatacatctgcttagagcttttctatgtgtctatataatgtatgcataatatacaattagaagcatgtgattttataacatttttaaacaaaagtggaatcacactgcaaatactgtttcatgacttttatgtgtgtaagtattgctacctatagatggaacctcagatttactgtattccccaagcctggactgtaaacaagacttctcatcccttcctctatggccatcttctcatttcacctcacatttggttatgacagccccatcactgtctatgaagtgctggctgtaaactcgtcatctggccttttcactcagcaatctcctgaagcatggttctgtgtcagtaaatgttcttatccagcatggcaaaatgttaaggtaattgtagactcacataagttgcaggaaataatacagagatcccttataccctttgcccagtttcccgcaatggtaacagtgtgcaaagctccaggacgattttgccacccatgttggcatgtgtaaccgccccccacagtcacgacactgaacatggccaccaccacaagtgcctagtgttgtgctacccttttacagccagcgcccctccctcctgcccggcccccctgcgttgtatttatggctgcattttgtcctgtcttgtggatgttccatggcggacagacaggctgaacaaacaaagggtgtgcaaagaagcccagagcaggagagaaggctccccagcctggctcttggtcagcacagtcacaggctggctctgcctctcttggctgcactgtcctgaagcaggaaatatgagaaaaacaagtaaagggaaaacaagtccagttggagctatgataacattatctgcaaggccaggcaggggccccaaagaaatgggatccaagagcagggacgagaaaagcaagttcttagtctccccctggaattctttccccatgccatcattctttgttctgctcttataactatttttgtaactatttctgcaagtttgcaaggattttataagttcatgttttcccatctatgcaggatggcaaaggtcacaagacatgcctgaattgcaaaacctgtcacagtttgattaactgcctttgttctgcttctgtaagctcgctttccccaccccgcaagttttgcaccactggctagccactccccttcagtcgcctgaataaaagtcaagcctgatctttgttcgttgctcagcctctggatattaatccgctgggccagtggccacctgaataaaatcctcctatttcaaaaaaaaaaaaaaaaaaaaaaaaaaaaaaaaaaaaaaaaaaaaaaaaaaaaaaaaaaaaaggccacatgtgctcgagctgcag

SEQ ID NO: 188 - DNA, 3129 bp, Homo sapiens
  nbla-10363
gtacggaagtgttacttctgctctaaaagctgcggaattcctcgagcactgttggcctactggatttgaaaacacgctccgggagctagagcctgaggtcggcggcgcacgctgttgccccgtgggcttctgctccctcgcttgtcttctcgggcttctcgccccggccgcggccgggtcctcagtagtcgagaatgactaaaaaaagaaaacgccaacatgattttcaaaaagtaaaattgaaagttggtaaaaagaagcccaagttacaaaatgctactcctacaaactttaaaacaaagactatacatctgcctgagcaactcaaagaggatggaacacttccaacaaacaatagaaaacttaacataaaggatttgctgtcacagatgcatcactacaatgctggggttaaacaaagtgctcttcttggacttaaagaccttttgtctcaatacccatttataattgatgcacacctttcaaacatattaagtgaagtgactgctgtgtttacagataaagatgctaatgtacgattagcagcagttcaacttcttcaattcctggcccccaaaatacgagctgaacaaatttctccattttttcctttggtaagtgcccatctctctagtgccatgactcacattactgaaggaattcaggaggactctttaaaagttttggacattctgctggaacagtacccagctctaattactggccgtagcagcatattgcttaagaattttgtagaacttatttctcatcagcagctgtccaaaggactgataaatagagacagatcccagtcctggatactttctgtaaatcctaatcggagactcacttctcagcaatggaggctgaaagtcttagtgagactcagtaaattccttcaggccttggcagatggatccagtaggttgagagaaagtgaaggacttcaggaacagaaagaaaatccccatgccactagcaactccatttttatcaactggaaggaacatgccaacgaccagcaacacatccaggtttatgaaaatgggggttcacagccaaatgtcagttcacagttcaggctacggtatctggttggaggactgagtggtgtggatgaaggcctgtcatctactgaaaacctgaaaggatttattgagataataattccattgctaattgaatgctgggttgaagctgtacctccacaactagctactcctgttgggaatggtatagaacgagaacctctacaggttatgcagcaagttcttaatattatttcccttctgtggaaactctctaaacaacaggatgaaacccataaattggagtcatggcttcgaaagaactaccttattgattttaaacaccattttatgagtcgttttccatatgtcttaaaagaaataaccaagcacaaaaggaaagagccaaataaaagcatcaagcattgcacagttctctccaataacatagatcatctcttactgaatttaacactgtctgatatcatggtctccctggcaaatgcgtcaactttgcagaaggattgcagttggatagaaatgataaggaaatttgtaacagagacccttgaagatggctctaggctaaatagtaagcaactgaacagattgctgggagtatcctggaggttaatgcaaatacagccaaacagagaggacacagagactcttattaaggcagtttatacattatatcagcagaggggccttatccttccagttcggactttgttattgaagtttttcagtaaaatctatcagacagaagaactgagatcttgtagattcagatatcgtagtaaagtgttatcccgttggctggctggcttaccattgcaacttgctcatcttggctcccgaaatcctgagctctctacacagcttatcgatatcattcataccgctgcagcacgagcaaataaagaattactaaaaagtttacaagcaactgccctccgaatttatgatccacaagaaggtgctgtggtggttctccctgcagactctcagcagcgtttggttcagcttgtatatttcctacccagtctgccggctgatttgctttctcggttaagtcgttgctgtattatgggaagactcagttcaagtttggctgccatgcttatcgggatactgcacatgagatcatcattttctgggtggaagtattcagctaaagactggttgatgagtgatgtagactatttcagcttcttattttccacacttacagggttttcgaaagaggagttgacttggcttcagagccttcgaggagttcctcatgtcatccagacacagctttcccctgtgcttctctaccttacagatttggatcaatttttacaccactgggaagtaacagaggcagtttttcacagtttattggttattcctgcccgaagtcagaactttgacatcttgcaaagtgccatcagtaagcatttggttgggttgactgtaattcctgacagcacggctggctgtgtttttggtgttatctgtaagctcctggatcatacttgtgtagttagtgagactctactgccatttctggcttcttgttgctacagtcttctttattttctgctcactatagagaaaggggaagcagaacatctaagaaagagggacaagctgtggggggtctgtgtctccatcctggctctcttgcctcgagtcctcaggttgatgctgcagagcctgcgggtgaacagagttgggcctgaggagctgcctgttgtgggccagctgcttcgactgctgcttcagcatgcacccctcaggactcatatgttgaccaatgcgatcttggtgcagcagatcatcaagaatatcacgacattgaagagtggaagtgttcaggaacagtggctcacagacttacattactgctttaacgtgtatatcactgggcatccccaagggcccagtgcactggctacagtgtattgaagaggccatagtacctcctgtttgaagttgtttattcacatctatcttatttgaagaaaaagactgatgtaatagatctttgtcattaaagctgaacttttaaagaaaaaaaaaaaaaaaaaggccacatgtgctcgagctgcag

SEQ ID NO: 189 - DNA, 589 bp, Homo sapiens
  nbla-10367
gcctgtacggaagtgttacttctgctctaaaagctgcggaattcctcgagcactgttggcctactgggaagatgcaaataaatactttgatctatgtttgattttgctaataatatttgaaggagattgcctaccaaggacaaaacaataaatttaaaaatcaaacgatttctccatacgctcatagtcacatatggaattttgagaaaataaagcatgctgtctttaggaatttttatacttctttgtctttcttccttaatatttgcttctagctgctcttggcaatgatgaattgttatgtatgcattaatgttttgcagcccaaaagttgttcacatttttcctatataagatctgtggagtgtgtgtttcaaagagagaactacagaaatgttaaagcgggaaaacctgaatgtgatgtgcacattttcatcccacatggacaatgtatgtgttttaataaatggaattttcagattcaaaaaaaaaaaaaaaaaaaaaaaaaaaaaaaaaaaaaaaaaaaaaaaaaaaaaaaaaaaaaaaaaaaaaaaaaaaaaaaaaaaggccacatgtgctcgagctgcag

SEQ ID NO: 190 - DNA, 788 bp, Homo sapiens
  misc_feature (2)..(2): n is a, c, g, or t
  misc_feature (5)..(5): n is a, c, g, or t
  misc_feature (11)..(13): n is a, c, g, or t
  misc_feature (27)..(27): n is a, c, g, or t
  misc_feature (30)..(31): n is a, c, g, or t
  misc_feature (33)..(33): n is a, c, g, or t
  misc_feature (35)..(35): n is a, c, g, or t
  misc_feature (663)..(663): n is a, c, g, or t
  misc_feature (712)..(712): n is a, c, g, or t
  misc_feature (723)..(723): n is a, c, g, or t
  misc_feature (755)..(755): n is a, c, g, or t
  misc_feature (758)..(758): n is a, c, g, or t
  misc_feature (767)..(767): n is a, c, g, or t
  misc_feature (776)..(776): n is a, c, g, or t
  nbla-10371-r1
gnagngggttnnnttgatggccctttnttnntncnttttattgctgatatgttggttttaattcaaaagaaacgatgatgccaatggtttggattgacagcagcttaaggaggaaaaaaaaaaaaagaaagaaaaaaagaaaaggctggtgacacccccctggcgtggttgacctggtcccagtcgcagtccctatgggacagcagagctgtcaaaacagaacccaatgatgacggctgaaaatcaagccagactgctgtgcggtcagcttgccgccgtggaatgccttgtgtcttggccatgtccagccaagggtacaacgtgcttgttcccgatcacccaggtttgccattggaagtcaaagacagaatcgcttcatggcactacagatgtggaaaaataaaaatctcagctagaaagaacgtccgatttggagatagcgggaggacacgaaggagtgggggccattttggtgctgagaggagggtgccccaacttcaggaggaccatgtgacggctgtggttgttttcggggtcacttgcagcacacacagcgtccccttgatgctcgatggggaccgcaaacggcctgcagacctaacccctggctgtggacaggaaaagcttgcttcaagcttctttccttctcaatgctttacacangatttccttcatttgggctttcctttgggttaacaagttaaaaaagaanatgagggggcnaaatgggttggcactttgtccaaactggaaanaanaggtggaantgggccccnaaatttctgggg

SEQ ID NO: 191 - DNA, 2935 bp, Homo sapiens
  nbla-10383
gtacggaagtgttacttctgctctaaaagctgcggaattcctcgagcactgttggcctactggctcttacagtggtccctgctggcccttggtgacgggtcgcgtcagttccgacccggacccgtacgctgctgcgctgacgtggctcctggaagcagggctggcgtagggccgccatgttgcagcaggatagtaatgatgacactgaagatgtttcactgtttgatgcggaagaggagacgactaatagaccaagaaaagccaaaatcagacatccagtagcatcgtttttccacttattctttcgagtcagtgcaatcatcgtctgtcttctctgtgagttgctcagcagcagctttattacctgtatggttacaattatcttgttgttgtcgtgtgacttttgggcagtgaagaatgtcacaggtagactaatggttggcctacgttggtggaatcacattgatgaagatggaaagggccattgggtgtttgaatctagaaaggagtcctctcaagagaataaaactgtgtcagaggctgaatcaagaatcttttggttgggacttattgcctgttcagtactgtgggtgatatttgcctttagtgcactcttctccttcacagtaaagtggctggaatctgaacctgtgatgttaagaaatcagtaaatattaaaaagaagatggatgcaagaaggatgaagaaagaagaaggactcacagaaaacactggacttccccggaagctacttgaaaaacatgacccctggccggcctatgtcacctatacctctcagacagtgaaaagactcattgagaaaagcaaaactagagaactggaatgcatgcgtgccctcgaggaaagaccctgggcatcaaggcagaataaaccttccagcgtcattcagccgaaaaggaggaagtcttccaagtcttctggcaaagctgtgttcagggacacgctgtcagaatccacgttatcaatgtggggcgcttattcggtattggccatggctcctaccatgatcccagaacccacacacttacatgcggattccagagactgtccaactgaaaactataacaagatcatctttgcccgcaagcctatgatgaggatgctccctacagttcgctactgaccaacaaggagaaacatgcaaatgttttagccaggggtccctgcagccattccccaagaacgtacaaaagttaagctccatttaccactcacttgacagtgtcctttaaatctgaacttgctcttgctcatgcggagcttggctaagagaaaccagatcagaatgcaagctgtaggtgggtgggtgagtgtgtcccctcccacactgctctctggtgggtttgggcagtccctggctctagtctctgctgcagattctcaggaccaaaatgtgggtgatttgtctgggtccaggcaggagacagaaatcacacaagctcttttattagagataatataaagaatgattaaccaggtgacagtaaagggcaggaagggaatacaaaggtatccatggaggtagcaccacaggaagcaggcatcacacttgaggcttgggaacaaggggaagatgctggactcattgaaaggtggttgcttggagaagggacatggggctgaatctcagacttctgaggtgggggagtggggatgccactcaatgcagctggtatctctgagctctgaggagagtcctgtggggatggtgccccctcctctgaataggggagatgttttgttggtgtctctgaggggacccccatgaggctgcttttgtgagtgttggaaaaaccaaaaactgcattgaaatgtttctgggaggagttgccactgcctgggtgaagaaaaagcactgctagggttagcaacctgtctggcaagggacaggaagctgatagaaagtgaacaggaagcaaacaggaagtgagcaaggggccacttcctacttcctcctttagcctagcagattccttctagctccccctgggggctgagcctatcagggcacaaagccagaatgtggtttgtagaatcccagccccagcatctccaagcataggatggattttgaagccaagagggaattagctctcggccgggttctgagtgatcccatccagctgctcctggacctggtattgagaggtttttcccttggagggcaaacaaagtggcagtggggaccagggtgtcccctgctgagaaatggagagctcttttcccctgtacttctctggggtttgccttgtggaaccaagtgcttgggggaggagctcctggcaggactccagctgttatttgtcagaggacagctaggattggttcacccttgctctgagttggccccaaagcgagctatgctgaactcttctccatctccaagcagacaacctttgtctttacatgcaagagggatccaattatgacaggctgacccagctggtttcatgtttggggtttatctactgagtaaggctgaccttacctgagtttctgtatgtgtatttgcaagacagttaatactaatccatcatccctcacagagatgtagaggatgagatgtagtaacttatagcagtgtcatttggaaaagttgaatttgccctacaaggcatgttctccattcaagggtcttgtgtaaacgtttgcagacacaggtgcagctttggagaactcacctctggctcttgtgcttttatgttgggacagctgcctaaattaggagctctagacctgttattggttcccaactgttggccagaatgaattcttcgaaaaatataggtggtttccagggaatttgaatgattgtattttgtgtccatggaacgtttatagacatggaggcaggcaataaattcctccaataattaaaaaaaaaaaaaaaaaggccacatgtgctcgagctgca

SEQ ID NO: 192 - DNA, 2139 bp, Homo sapiens
  nbla-10388
ttctaggcctgtacggaagtgttacttctgctctaaaagctgcggaattcctcgagcactgttggcctactggaaatgtagatagccttacaagctttaagtccattaaaaatggtaatgataaggacatcactgctgaactttctgctcctgtgaaaggacagtctgatgttttactttctaccaccagcaaagaaataatttcatctgaaatgttagctacttccattgatggcatggaaagaccaggaaatttaaataaagtagtggagcagagacagaatgttggaacacttgaaagtttctctccaggagattttagaactaatatgaatgttgttcatcaaaacaagcagttagagagctgcaatggtgaaaagcctccttgtctggagattctaacaaatgggtttgcagtgttggaaactgtaaatcctcagggaacagatgatctggacaatgtagctgattcaaagggacggaagcctcttagcactcatagcactgagtataatttagactctgtacctagtcctgctgaggaatttgcagattttgccacattttccaaaaaggaaaggatacaattagaagaaatagaatgtgcagttttaaatgatagagaagcactaaccattcgggaaaacaataaaattaatagagtcaatgaactgaattctgtaaaagaagtggctttgggtagaagcttggataacaaaggagacactgatggagaggatcaggtttgtgtttcaaaaataagcatagtgactaacagaggtttcagtgttgaaaaacaaggccttccaacactgcaacaggatgaatttttacagtcaggtgttcagtcaaaggcttggagtttggtagactcagctgataattcagaagccattaggagagaacaatgtaaaactgaagaaaaacttgacttacttacttctaaatgtgctcacctatgcatggattctgttaaaacttctgatgatgaagttggttctcccaaagaagaaagtagaaagtttactaatttccaaagcccaaacattgaccccacagaagaaaatgatttggatgattctttaagtgtaaaaaatggtgatagtagtaatgactttgtgacttgcaatgatatcaatgaagatgattttggtgattttggtgactttggctctgccagtggctcaactccaccttttgttactggtactcaagattcaatgagtgatgccacttttgaagagtcttcagagcactttccacattttagtgaaccaggtgatgactttggagaatttggggatataaatgctgtttcttgccaagaggagacaatattaacaaagtcagacctaaaacagacttctgataatttatcagaagaatgtcaattggcaagaaaatctagtggaacaggcactgaacctgttgcaaaacttaaaaatgggcaagaaggtgagattggacattttgattctgtgccaaatattcaggatgactgcaatggttttcaagactctgatgattttgcagacttcagttcagctggtcctagccaagttgtagattggaatgcttttgaggatgaacaaaaagatagttgttcttgggctgcttttggagaccagcaggctactgaatctcatcatcgaaaggaagcctggcagtcacataggacagatgaaaatattgatactccaggaacccccaaaacgcacagtgtaccttcagcaacttccaaaggagcagttgctagtggccatttacaggaatcagccacttcagttcaggtatttactaattttctctattttgtatgatgtattaattgttgtggaggcttctaatttcagcttttcaaaaaatattttttcaactgagtacttgttaaaggagtctcgttatgatgtataatgcctgtctgatttgtgggttggttacatttttcacaaccctttgggaaactacaaatagtcctatagtaaagcgcagtaagatttttctttatctcaatgagtttcgttaatatttacagttactcatcaacttggatttcttggtgactataaataccatatatgttaaaaaaaaaaaaaaaaaggccacatgtgctcgagctgcaggtcgcggccgctagac

SEQ ID NO: 193 - DNA, 821 bp, Homo sapiens
  misc_feature (2)..(2): n is a, c, g, or t
  misc_feature (4)..(5): n is a, c, g, or t
  misc_feature (14)..(14): n is a, c, g, or t
  misc_feature (16)..(16): n is a, c, g, or t
  misc_feature (18)..(19): n is a, c, g, or t
  misc_feature (27)..(28): n is a, c, g, or t
  misc_feature (605)..(605): n is a, c, g, or t
  misc_feature (607)..(607): n is a, c, g, or t
  misc_feature (659)..(659): n is a, c, g, or t
  misc_feature (674)..(674): n is a, c, g, or t
  misc_feature (680)..(680): n is a, c, g, or t
  misc_feature (687)..(687): n is a, c, g, or t
  misc_feature (759)..(759): n is a, c, g, or t
  misc_feature (794)..(794): n is a, c, g, or t
  misc_feature (821)..(821): n is a, c, g, or t
  nbla-10390-f
gngnnggggtgggntncnnttttgaanncccttgcactgttggcctactgggctctcgagtgtctccaagcaagatggcggaggagccgcagtctgtgttgcagcttcctacttcaattgctgctggaggggaaggacttacggatgtctccccagaaacaaccaccccggagcccccgtcttccgctgcagtttccccgggaacagaggaacctgctggcgacaccaagaaaaaaattggttgtgaattcactccttaaaccaaaaaccaaattcttatgcagaatgaagactgctaagggaaagctaaaggcatagatgttacctttttaagaaacacattttggaacctttttgacattttgctaaaggctgtgggagacactcctattatgaaaacaaagaagtgggcagtagagcgaacacgaaccatccaaggactcattgacttcatcaaaaagtttcttaaacttgtggcctcagaacagttgacccaagaggtataggtcctattattttccatatcttacaaataaagaggatgagagattatttgtaaagccaggattcaaacccagtttatttatgtgaatcaagtcctttgntncttcccagaccaagaagttggaactctctatgagtggtttggcagtgatggnaaactgggtttacantactgnaagtctnaagcgtggggatgaaccccaaggaaaatcaacttgttctacatgaaaaggatttcacgggaagaaacagttntgaaagtttgatcttgtggaagaacttacagatgngaccattaagatggggtacttatggtn

SEQ ID NO: 194 - DNA, 821 bp, Homo sapiens
  misc_feature (2)..(2): n is a, c, g, or t
  misc_feature (8)..(12): n is a, c, g, or t
  misc_feature (33)..(33): n is a, c, g, or t
  misc_feature (449)..(449): n is a, c, g, or t
  misc_feature (614)..(614): n is a, c, g, or t
  misc_feature (669)..(669): n is a, c, g, or t
  misc_feature (699)..(699): n is a, c, g, or t
  misc_feature (705)..(705): n is a, c, g, or t
  misc_feature (707)..(707): n is a, c, g, or t
  misc_feature (732)..(732): n is a, c, g, or t
  misc_feature (765)..(765): n is a, c, g, or t
  misc_feature (820)..(820): n is a, c, g, or t
  nbla-10390-r1
gnaggggnnnnntttgtggcctttttttttttntttgagatggggtctcactctgttgctcagcaggaatgcagtggtacaatcacgactcactatacccttgaacttctgggctcaggggatcctcttgcctctgcagcctaataatttttttttaatttttatttttttgtagagttggggatcttgccttgctaaccaggctggtctcaaacttgtggcttcacgcaatccccacacctcagccttccaaagtgctgggattacaggtgtaagccaccatgcctgatctggaatgctttctaaaaatatggcattataaacataatactaaagagaaaaaaaggttaaatttcacttcaagaaattatcagtctaatagcatcagtaaaaatggcacttttagtcatggcataaaatatacaataaggctatttttcaattattgntttcaagttggaaaatgcattatgaaacactcaaaaagatgctactgggtttactcatcaagtgcttttgacaccatataaatgacagagtaacaccacagttatgtgattgggactcaagaatccttaaatggtaggactgaaaacaggtatatgacttattgnccagaaattatatttttctggatccaataaaataattaagccctgtgtattgggnaaaaatacaggctttcaatctggcctatgngcttgntnttctggctagatattagcttaaaantagcaaaacagccattttccctatatttcccancaaaatgggaaaccaaacgcctaacctttttgcctgggggctgccttactggctnt

SEQ ID NO: 195 - DNA, 2131 bp, Homo sapiens
  nbla-10396
gtacggaagtgttacttctgctctaaaagctgcggaattcctcgagcactgttggcctactgggacaaagctagcgatgctttatgctaggaaacttgttgacagtaacctgtgcgactttatgcagaagacaaatgctagtaattattatgcacagaggaaaaatcattttaagtatgtggtaaagcagcttcatctttcaaaattgatttgctctggtttttctttagtccattagattccagaatgtccttttactgggaatttagttatgtattaagataacctgttttcagttctttttgaaaagaagacattatttatattgaaccaccttattttaaaatttttaacttttatataccacttgtgtgattccagtgtcatgtcttgggtttgatgtcgttggacagaaaagtgtatcaattattttaaatgaatttttccccatgtttgaggcttagtctgtaaatgtgttgctgtaacagaaaatacttgggtatgcattacttgaatacttgaaagctgaaattaataagatgtattacataatgaattagatttctctgaacagtttttacactgaaaatcttcatttctggattgcagtttgaaatggaatgaagacctgaattatttgggtagaaaaaattatgatagtgcttataagaactgtaaactgttttaaactattttgtgtttgacgcatcaaacttcaagttttttgtaagtttctctcctgaaattttctttctcttctatactttatgcacttactatactactgatgtaataaaagagcagggttaaaaatattgtatctgtattcattgtgaatcctgtagcttttctagttaacaaaaaatcgctttctaaaatactcttaatcccattgttttggttaacatcttacccatttgttgtatttcaaatgccattaatcattttagtacaacacctatgtttataaaaatttgaaaacattacatattgtatttaaaactaattagtgaagagtaagaaaaaaactagccaacagaattgtaggtgatgcattagttaaatttcaaaactcataataaaggaactttcagagattggttgaaacccagtggtatccctgtaaattagctcctgtgactggaaaagaccccaaaaaggcagtagaggagattagtgtttacttgctgtggttgtggtgtgctgctacttaattataggtagtgacacactgaaattcttatttgtccaataatctgaagtagtttcctatatttatctgtactaaattgactataaattgagtctgcaaagaggaaactttttgactgtactgtatttaggagcctttgtacagcttggtcaaatttccatgatatgaagtatttgagttttaaaatatactgttattaaaaggaaaaagacatggccattattccatgtgcttaaatgataatttccttattcagtttcagaagaaaaagaatgaaattgggtaactgtcattgcgttagctttatgttgaattgggaaattgtggcataaagcttaaattcgtgtttatcaaatgtgaaccatagtagtataatgctgctttgtatataatgtaagtgctacaaatagtctcagcactgaaaatgtattgatacctcttaaatgaatgcaacttttgatgtaggtgttttgctatgcctcagaaaatatctgtctgagaatttgttaatctgtttgataatgaagatacttcctgttttcttgtttcatattttcatgttcaaaatttaagttttacatttttactactgttaatttaaataaaatttgttctgtggataaaatgaggttggcagtgaagaaaattaaaaacagcctcattcatgtaactggttaagtaaaaatacattttcactatgtgttcataaacttttaatgaagctgtttgtctttcagttcaaatataagtgatgtttaggctttatttctgttaataaggctttttaccattgattaaatgaaggaatgtatctttttgaagagatttatattctgtaaataaaaattcgttgtaacaataaagttgagttctaactacaaaaaaaaaaaaaaaaggccacatgtgctcgagctgcag

SEQ ID NO: 196 - DNA, 775 bp, Homo sapiens
  misc_feature (1)..(1): n is a, c, g, or t
  misc_feature (5)..(5): n is a, c, g, or t
  misc_feature (531)..(531): n is a, c, g, or t
  misc_feature (542)..(542): n is a, c, g, or t
  misc_feature (628)..(628): n is a, c, g, or t
  misc_feature (656)..(656): n is a, c, g, or t
  misc_feature (667)..(667): n is a, c, g, or t
  misc_feature (672)..(672): n is a, c, g, or t
  misc_feature (697)..(697): n is a, c, g, or t
  misc_feature (701)..(701): n is a, c, g, or t
  misc_feature (713)..(713): n is a, c, g, or t
  misc_feature (723)..(723): n is a, c, g, or t
  misc_feature (727)..(727): n is a, c, g, or t
  misc_feature (738)..(739): n is a, c, g, or t
  misc_feature (747)..(747): n is a, c, g, or t
  misc_feature (750)..(750): n is a, c, g, or t
  misc_feature (755)..(755): n is a, c, g, or t
  misc_feature (762)..(762): n is a, c, g, or t
  misc_feature (770)..(772): n is a, c, g, or t
  misc_feature (775)..(775): n is a, c, g, or t
  nbla-10398-f
ncctnggcctgttggcctactggcattagctcagagaactatctaattataggtggacgagatcagcaacagaatgaaatacttgtgaaaagatacttgacaccaggagaacccatccccccacggaccttgactgaagctggcacaatggcactttgctacagtgctgcttgggatgcacgagttatcactagtgcttggtgggtgtaccatcatcaggtatctaaaacagcgccaactggagaatatttgacaacaggaagcttcatgataagaggaaaaaagaattttcttcctccctcatatctaatgatggggtttagcttcctttttaaggtagatgagtcttgtgtttggagacatcagggtgaacgaaaagtcagagtacaggatgaagacatggagacactggcaagttgtacaagtgaactcatatcagaagaaatggaacaattagatggaggtgacacgagcagtgatgaggataaagaagaacatgaaactcctgtggaagtagaactcatgactcangttgccaagangatatcactcttcagagtggcagagatgaactaaatgaggactcattcaggaagaaagctctgaagacgaaggagaatatgaaganggtagaaaagatcaggattctggtgggngaaatgaaggntgaanggggaagagaccttaaatattctgntctnccatggcctggnttaccttaancccnaaggtcattcnnaaattggnttnaaaanaggaacntttaattnnnggn

SEQ ID NO: 197 - DNA, 791 bp, Homo sapiens
  misc_feature (2)..(2): n is a, c, g, or t
  misc_feature (4)..(8): n is a, c, g, or t
  misc_feature (29)..(30): n is a, c, g, or t
  misc_feature (481)..(481): n is a, c, g, or t
  misc_feature (489)..(489): n is a, c, g, or t
  misc_feature (513)..(513): n is a, c, g, or t
  misc_feature (537)..(537): n is a, c, g, or t
  misc_feature (568)..(568): n is a, c, g, or t
  misc_feature (605)..(605): n is a, c, g, or t
  misc_feature (608)..(608): n is a, c, g, or t
  misc_feature (630)..(630): n is a, c, g, or t
  misc_feature (635)..(635): n is a, c, g, or t
  misc_feature (687)..(687): n is a, c, g, or t
  misc_feature (695)..(695): n is a, c, g, or t
  misc_feature (697)..(697): n is a, c, g, or t
  misc_feature (703)..(703): n is a, c, g, or t
  misc_feature (708)..(708): n is a, c, g, or t
  misc_feature (722)..(722): n is a, c, g, or t
  misc_feature (730)..(730): n is a, c, g, or t
  misc_feature (743)..(744): n is a, c, g, or t
  misc_feature (746)..(746): n is a, c, g, or t
  misc_feature (749)..(749): n is a, c, g, or t
  misc_feature (765)..(765): n is a, c, g, or t
  misc_feature (775)..(775): n is a, c, g, or t
  misc_feature (778)..(778): n is a, c, g, or t
  misc_feature (780)..(781): n is a, c, g, or t
  misc_feature (784)..(784): n is a, c, g, or t
  misc_feature (786)..(787): n is a, c, g, or t
  misc_feature (791)..(791): n is a, c, g, or t
  nbla-10398-r1
gngnnnnntttgtggcctttttttttttnnttttggtgaatatagcaaggcaatgtttagttcatttttataatgcggaaatcctgatacatggtgctttcatctttgaacttccaaaaggctataaaattggctcttctcaaatattttagaatttcatttcagctatttcctttttacgttcagaagattgggtgcagacactttcactttgccaggaatgtttcttgataaatctgtgtcctttacgctgcggaataagtctttttctcttgctgttgcttctttggaatgcatgaaactattcaaggctgtttttgcagcttttccctttttctgcactccaggagtaagtttcactttatatttgtagtttgtcatggtggtgtaaggggcacatattggaatggcaaacagtagtgcatcttcaggatgtggctggcctgtcaaagaatcaaataggttttcctcatttccctgntgatccanatcttgctcttccttgcatcatgnggatcatctacagcaaagtcttgnaactcatgagttatacctcaaggaacggagnttctttcttaatggtgcagaaaccctttgtccacctntangttctggggctggtctttacanggtcngcccttggttttccttcttccctcttcctttttcttcttggttgaaccctgnagaacccnanaacttnatganaagtcacgggcttnttaatccnggccttggaattnncnttnaatttttcaatttaancctttggccncgntnnatngnnggcn

SEQ ID NO: 198 - DNA, 802 bp, Homo sapiens
  misc_feature (2)..(3): n is a, c, g, or t
  misc_feature (5)..(9): n is a, c, g, or t
  misc_feature (12)..(21): n is a, c, g, or t
  misc_feature (27)..(27): n is a, c, g, or t
  misc_feature (34)..(34): n is a, c, g, or t
  misc_feature (478)..(478): n is a, c, g, or t
  misc_feature (559)..(559): n is a, c, g, or t
  misc_feature (561)..(561): n is a, c, g, or t
  misc_feature (650)..(650): n is a, c, g, or t
  misc_feature (656)..(656): n is a, c, g, or t
  misc_feature (660)..(660): n is a, c, g, or t
  misc_feature (662)..(662): n is a, c, g, or t
  misc_feature (664)..(664): n is a, c, g, or t
  misc_feature (680)..(680): n is a, c, g, or t
  misc_feature (682)..(682): n is a, c, g, or t
  misc_feature (699)..(699): n is a, c, g, or t
  misc_feature (745)..(745): n is a, c, g, or t
  misc_feature (749)..(749): n is a, c, g, or t
  misc_feature (752)..(752): n is a, c, g, or t
  misc_feature (754)..(754): n is a, c, g, or t
  misc_feature (758)..(759): n is a, c, g, or t
  misc_feature (764)..(765): n is a, c, g, or t
  misc_feature (768)..(768): n is a, c, g, or t
  misc_feature (776)..(776): n is a, c, g, or t
  misc_feature (779)..(779): n is a, c, g, or t
  misc_feature (789)..(789): n is a, c, g, or t
  misc_feature (796)..(796): n is a, c, g, or t
  misc_feature (802)..(802): n is a, c, g, or t
  nbla-10399-f
gnngnnnnnttnnnnnnnnnntttganttcctcnagcactgttggcctactggaaatctgtaaaagacctccagcgctgcacagtgtctcttgcacggtatcgagttgtagttaaagaagagatggatgcctccattaagaaaatgaaacaagcctttgctgaattggagagctgtttaatggatcgagaagtggcgttgcttgctgaaatggacaaagtgaaagctgaagcaatggaaattttgctcagccgacaaaagaaggctgaacttctaaagaagatgactcatgtggctgttcaaatgtcagagcagcaattggttgagctcagagctgatatcaagcactttgttagtgaacgtaaatatgatgaggatctgggacgagtagcccggttcacctgtgatgtagagaccctaaagaagagcattgattcatttggacaagtgtctcatccaaagaacagctattcgaccanatcccgatgtagctcagttacatctgtgtccttgagtagcccaagtgatgcctctgctgcttcctctttcacctgtgcctntnctccaccttacaagtgctaacaaggaaaaactttgcaccgggagagacttctgcagccatagcaaacttcaatgggcaagcctaccagncctttnggangnantggcagggaacagacnangaggacaggctataggncacaaggccaaagtccaatgacccattaaccaagggcggattacantttnggncntacnnaacannttnggggattnaantggttcaagnttaaaangctccn

SEQ ID NO: 199 - DNA, 811 bp, Homo sapiens
  misc_feature (2)..(3): n is a, c, g, or t
  misc_feature (5)..(5): n is a, c, g, or t
  misc_feature (8)..(9): n is a, c, g, or t
  misc_feature (561)..(561): n is a, c, g, or t
  misc_feature (586)..(586): n is a, c, g, or t
  misc_feature (620)..(620): n is a, c, g, or t
  misc_feature (625)..(625): n is a, c, g, or t
  misc_feature (645)..(645): n is a, c, g, or t
  misc_feature (648)..(648): n is a, c, g, or t
  misc_feature (674)..(674): n is a, c, g, or t
  misc_feature (680)..(681): n is a, c, g, or t
  misc_feature (693)..(694): n is a, c, g, or t
  misc_feature (725)..(725): n is a, c, g, or t
  misc_feature (727)..(727): n is a, c, g, or t
  misc_feature (735)..(735): n is a, c, g, or t
  misc_feature (747)..(747): n is a, c, g, or t
  misc_feature (765)..(765): n is a, c, g, or t
  misc_feature (768)..(768): n is a, c, g, or t
  misc_feature (773)..(775): n is a, c, g, or t
  misc_feature (778)..(778): n is a, c, g, or t
  misc_feature (805)..(806): n is a, c, g, or t
  misc_feature (811)..(811): n is a, c, g, or t
  nbla-10399-r1
gnngngtnnattgtggccctttttaatttcctttgggcatacttatgcagttgtttttatttattcaactgtaaagactgcagcaatttttttgatgagtaatgccttagattaacactaattatattgctataaatttggttcaggatcagaatagggttcaggaaagggagagaacaaaaaaaaagtctccaaacattaaaacagagaaatgctttttttttttttttgagactgagtcttgctctgtctcccaggctggagtgcagtggcacaatctcagctcactgcagcccccgcctcctgggttcaagcgattctcctgcctcagcctcctgagtagctgagattacaggcacacgccaccatgctcagctaatttttgtatttttagtacagacagggtttcaccatgctggccaggctggtcttgaactcctgacctagtgatccacccgcctcagcctcccaaagtgctgggattacaggcatgagccacaacgcccaacctttttttttttaaactttaattaaatgctactttctcatagacttccctanactgggttgcaatctaagggaatanggaaacaaggcattgggcattttgaaaaaactgnagggntaagctatggggcccagccnaanacttaaccctggtttgagggcaaatnttcagnncaatttggggannaaggcagggtcttaaaaaggttcctaagggncnttcctttnactaaataaaanttcccttttttggggaanccnggccnnnttncaaccccctggattggcctttttgggnnaaaan

SEQ ID NO: 200 - DNA, 1941 bp, Homo sapiens
  nbla-10454
ctgtacggaagtgttacttctgctctaaaagctgcggaattcctcgagcactgtggccttttttttttttttttttcaaacacttcttgttctgatacgttcaaacatcttggtgtttaggttggggaagctgagttgttgtttatgagttatctccagtgctcagatatccggcagctttttcctaggaagtcagctttgcacatgagagaaaggaaaaaaaaaaaaaaaaaaaaaaaaaaaccaaactgctggaggagaggtgggggaaggttgagaaagttggagaagggggcaaagatcagaaagaataaagcctcgatatccaggattgtcaaagattaaagtcatgtggacatttccatccctagaaagttttccttctttggccgggagcggtggctcatgcctgtaatcccagcactctgcccgactgcctttatgaaatatggtaatttaatgcttaaacaactgtttcatttgtgtactttttgggagaaagtactacgtaaaaccagtgcttaatgattttgacaattaaattatatgtgattattatcttcctatagtgtttttttttttagaagagctactcagatatagcagattaatatcactcaggcacctgggtttcctagcccagcaattctgaatgtacagagtacaagcatataatgccaactggtaaagtcagagctccagatgacaaggtacagcatgtaatcttttgcagtctattgacagcaatctaaataaaagcaaaggaagaagcttccagtactacaaactttatgggaacttagggtctctcaaagccacactgtttgggtcactagcaggaggtacagtatattaaagcaagcagctcagcctctcactagtggtgagatgtatgaaaatcctggcaatgccagggggaaaagaatctatgagtcttcccttcggtcatctctcctatttcttgcattagttttttcagggttaaatacgcatctcacagaagagctagctatatatgggctgggtggtcttcagtgaatctgcaaatgtatcaaacaaaaatagcaagctggaactggaataaagggtcagggaatacaggaaagaagaaaacaaagggttctaggtgttcagaagtcaaatacatctcagggctaaaaaaaaaaagaaagaaagaaagaaagaaagaaaaagaaatctgagtgtgtcctgtgttctacctccctgtagcttatgaattctatagaactcaaaacatcaaaccaccaaagacagatgattaagaaagaaaagacagatgaaaatgtgacagtcattgaactctaaaattcaaagcaattattactcagagttctagagatttcctatgaaaggtgagtggagataaaattgcataaaatggaattacgatcctcctctgcaatctgaccagacagaggaagaagacccaagaaaatgtcaaataaacttttgctcaccaatcagcccatgccttgagacttttaatccctctttttccttctttacttttattagaaaaaaaacagaaaaaacaaaaaaaacaactataatggtaccaagacacattttaacaagaaggtttttgtttgttgtttttttttcctctctctctctctctcttttttttttttttttactaaggccaggtttttgagtgattcaaaacattcttttgtggtgtgatcatattcattctgcactaacacctctagccttttttttttttttttttcaaacacttcttgttctgatacgttcaaacatcttggtgtttaggttggggaagctgagttgttgtttatgagttatctccagtgctcagatatccggcagctttttcctaggaagtcagctttgcacatgagagaaaggaaaaaaaaaaaaaaaaaaaaaaaaggccacatgtgctcgagctgcgag

SEQ ID NO: 201 - DNA, 794 bp, Homo sapiens
  misc_feature (3)..(7): n is a, c, g, or t
  misc_feature (13)..(14): n is a, c, g, or t
  misc_feature (16)..(20): n is a, c, g, or t
  misc_feature (23)..(23): n is a, c, g, or t
  misc_feature (514)..(514): n is a, c, g, or t
  misc_feature (521)..(521): n is a, c, g, or t
  misc_feature (558)..(558): n is a, c, g, or t
  misc_feature (624)..(624): n is a, c, g, or t
  misc_feature (696)..(696): n is a, c, g, or t
  misc_feature (720)..(720): n is a, c, g, or t
  misc_feature (736)..(736): n is a, c, g, or t
  misc_feature (743)..(743): n is a, c, g, or t
  misc_feature (771)..(771): n is a, c, g, or t
  misc_feature (780)..(780): n is a, c, g, or t
  misc_feature (784)..(784): n is a, c, g, or t
  misc_feature (793)..(793): n is a, c, g, or t
  nbla-10456-f
ggnnnnntggggnncnnnnnttngaattcctcgagcactgttggcctactgggtcatgtagaacattatccacgtggctgtggctgtggctgtggctgggccctggcaggtggaaaaccatctcccagaaacctgaaagcacctgccaatgacgcagataaccctggccctacagcctgcttgctccgcctataccacagagcacagcctggacattatggagggtgtggcgggacggcccacacctgggtcctccatcgggaacttttcatgcttctttctccacctgaggtcttggtctgaagaagacctcaggactcacatcttcactcctgggcctttgcacttccagacgacaggtcatcgttcaagcagaatgcagacaggccattcacgagcccaagttgaagagaagagacgcccatccgtgaaggagcagaccatccatccgatcctccccttccctgtccttcttcgtggattgtctccattgtccagacagtgcccccacctnccaccgncttgcctactggcaatctggactcgatggagaacatncccccaccttcatttggcactacccaagtggagtgtacccttgcctttcacctgtaccacccactncaaccttccccaacttgccaatgcttctggggaatttaatagctaccatgcaggccacaaggaatttgtgangcttctttggcatctttggatctncaagttggcttctttnttcatanccctgctttactttccttccttggaatnaggggtccnttanccatttgcnt

SEQ ID NO: 202 - DNA, 807 bp, Homo sapiens
  misc_feature (5)..(5): n is a, c, g, or t
  misc_feature (8)..(10): n is a, c, g, or t
  misc_feature (673)..(673): n is a, c, g, or t
  misc_feature (773)..(773): n is a, c, g, or t
  misc_feature (787)..(787): n is a, c, g, or t
  misc_feature (789)..(789): n is a, c, g, or t
  misc_feature (795)..(795): n is a, c, g, or t
  nbla-10456-r1
gaggngtnnnttggtggccttttttttttttttttgccaagataaatcacttttatctctataggaaagggaggatctaaaaaaaatataaattacattagtaacacaacataagaaaaagacagggacaaaaacaacagagaagtctgaatgatgctaccctaacctatttataaaaaggccctgcatcagaaattcacaatcctacccacttctaaaaatatatttagacatgtacagaagcggtgggcttgtttttaaattgtttgctttttttgtaaaaatatattaaaggtgaatagaaatcctctctcccttccccctgtccagcccccagctagggactggagatcaggggtaactatctcatggtgttctaaaccttgattactaacactcccaacccctccccaactcacttcacttagaacctgaaacattaaaaaaaacaaaaacaaagacatcagcctctttggaaaagcataactctgagggtaaacttgcttttcattggaaacaacacaaaacaacaaacagggggctctaagaacccaactaagctaaatgaaacccagtcaaacagaggctgggtttcaagctccacagaaaacttctaacaaagaaatagaggggaaaaggccggaatcggggggatttgctagcaattagctgnctttgaaagatcaagaaggggtgttaatggacaaaaaggctggggacctgacttggttcagcagtcaccgcatagtcaggcagttggctatacaggacanagccttttctggtntnccttantacccttggtgg

SEQ ID NO: 203 - DNA, 2180 bp, Homo sapiens
  nbla-10457
gtacggaagtgttacttctgctctaaaagctgcggaattcctcgagcactgttggcctactggctgagcatcagactaattctgaagcatatttgctagaggagctactttgcttttcacaatggggtggagaggattctttcacttgtcccattaaccctcttctagtctagatgagatgaaatctgttaatgtgtgtgtagaagaaaacgtatgttcttctactcagcattgcccttttccacctcctcacttcacctccgagtagcttgtttatcaagaatgaatgaatgtctttgtcttaaattttgcccatgtgttaaaagatgtaattctcagaatgggagagaaatgactacctttgttcctactcttttatataattatccttttagggaaagacttggtcaactctaatatatctagaaggaagactatatctggtgtagactaatatgagatgttttagaagagttaacctgaacactttgagggagagattattcttgccagcaaaaagctagccaggaatgagcctaccacattatttgagaatatcaaacctcaggcctggggggatgaggggaagaagattaccagaagtgcaggaaagagaagtttgaggaacacccttggcttagcaacatgtgataatgcaaagctgttataacctgttaatcctacgtactatgtgttctgtacctttacatgtttttaaatttaagatagtttgtaagaactgtacaaaaaaatgcttctggagatttctttggcagaaatgcctttcatctataatttcatggagaactgctttaattagcctaggtgaaaagtagtcctagcagtgtaaatatgtataattagagttttctaatttcactgtgagatctctaacttttgagtggcaaacagatcaagtcttttgctcatagacttttctgtggggttattaaaatgcaaaagctttattttttttaataatgccatactccattagtgtcagatgatggtatggaatttgttcccttgctttcccccactgttactgcttcagtttatagattgccagcagagttcagaaatagagcagggatttacccgttctttgcttggacatcccattttcttttgtccagacccatgttggcaatcatgtatgaactgtgttatacttctcagtgctttcttttttctttttgataagatggatatcaaaaatagttgctgtgcaaaagttagtagtcttcttcaagaagaaaatcaattctttttctaataatatcctgtgaaattgcttcattcattcatttatttttaagccaaatgtcagcagagtgctgctgcttttatctagtaattttgatatgtaagtattaatgcatttttaaaagatgtctacattgaaacatgttcttcccagtgtcctgcttatgatgctttgttcagattttttgtaagagaccagttagtacactgggggtgtatattgtgtacatgtgtcattttagttaggcattgtaggccaaatgtgattataaatgaagttgatgaacattaattttgttattagtgagttttttgaattgtaaatggatttccagtttaccttctgttgtctacagcttttttaattttaaggtttgactaattgtatccatctcattgtacagtgttttagttgcaagcagaaagtagaatttggtataaagcaggttatttctatattgaaaggagtacagttgaaattgtagatttaagattgttaaaatcatgacaattctaacttgtctattctaacctattgtgtacaatctgattttttaaaattgtaaacatgtatgatcttggtttcatgtgtttttgaaagtgttattgtttaaaaaatgaaaaaagcatatctgctaaagagctgtcagttttcattactgactctgtaaaatacactgttctttgtgtactgtgtgttattttgccagctgctgcattagccttcaaaagtatttggaaacttaagatgaactacatttcttgcaaagtacattcctttctgtggtattttgtcctgtaactgaagtatagtaattattttatggaaatgttagcaattctgtaccaactttgaataaaatgaaaaatttataaaaaaaaaaaaaaaaaggccacatgtgctcgagctgcag

SEQ ID NO: 204 - DNA, 805 bp, Homo sapiens
  misc_feature (1)..(3): n is a, c, g, or t
  misc_feature (5)..(6): n is a, c, g, or t
  misc_feature (10)..(12): n is a, c, g, or t
  misc_feature (19)..(25): n is a, c, g, or t
  misc_feature (31)..(33): n is a, c, g, or t
  misc_feature (446)..(446): n is a, c, g, or t
  misc_feature (527)..(527): n is a, c, g, or t
  misc_feature (607)..(607): n is a, c, g, or t
  misc_feature (609)..(609): n is a, c, g, or t
  misc_feature (628)..(628): n is a, c, g, or t
  misc_feature (644)..(644): n is a, c, g, or t
  misc_feature (661)..(661): n is a, c, g, or t
  misc_feature (683)..(683): n is a, c, g, or t
  misc_feature (749)..(750): n is a, c, g, or t
  misc_feature (757)..(757): n is a, c, g, or t
  misc_feature (785)..(785): n is a, c, g, or t
  misc_feature (788)..(788): n is a, c, g, or t
  nbla-10473-f
nnngnngggnnngttgggnnnnnnntttgannncctttgcctgttggcctactggtttttattaatctactgtatcaataaaattctgtaatttgaatgagtttttaatagtctagaatgttattgtgtatagatatttcctcttgaacgttatgttcagaaaatgcaaattacactataatataaaacctgatatatacacattagaaatactccagttctccgtaacagtgtaaagttaatcagaaagaaaaaattttattgatgcagtgtgtctttataaagctgttcttgaaagccaagtgttttgtattttatagtgagttgcatgtttttgaaaaaaagtgctgaaaatgggatgtgctgttttctgtaaattcatatttagccatagtatatgatagattgccccataacatagtttttcatcaagagtttattattgnactttattttggagccaaaaaattgattctggggggtgggggcagcgtagaagtggtatatccaagtatatcagctactgnagttgcacagcttgtgaactttgaatgaaattccactttgccagattgggagaagtggaaattatttggatttagagcangnctttttttttcttcattgnaatctgcaaaatgtangaaataaattacttaangcagtatcctttatacaggtgnataaactggattttggacccaaacatatagggtactacttaatgcttacctaatttcattttaagnntttaagngctggtaaggtttttcatgggtacaccnganggggaaaaatcattttt

SEQ ID NO: 205 - DNA, 808 bp, Homo sapiens
  misc_feature (2)..(2): n is a, c, g, or t
  misc_feature (7)..(7): n is a, c, g, or t
  misc_feature (11)..(13): n is a, c, g, or t
  misc_feature (29)..(33): n is a, c, g, or t
  misc_feature (349)..(349): n is a, c, g, or t
  misc_feature (624)..(624): n is a, c, g, or t
  misc_feature (696)..(696): n is a, c, g, or t
  misc_feature (712)..(712): n is a, c, g, or t
  misc_feature (726)..(726): n is a, c, g, or t
  misc_feature (748)..(748): n is a, c, g, or t
  misc_feature (751)..(751): n is a, c, g, or t
  misc_feature (789)..(789): n is a, c, g, or t
  misc_feature (797)..(797): n is a, c, g, or t
  nbla-10473-r1
gnagggngttnnnttggtggccttttttnnnnncctttttttttttttttttagaaagccatttaacctttaatacctggaataagttttacagccacatttgtaatttacatatacagtgaagatcactgaaaaagcctcctgttgcactgcagcaagaaattttattataatgtagattaaacaaatttgctacagagtgcagcaagataacctcactgaggaataagattttcataatggaacttgttacagggagttaaatattttcttaatgttatacagtacatattttcaaaatgaacattatcactgaaatagtttgctaacaattgttagcaattaatgntttatacacacttaattttactgtaaagtatgtggctctccaaatcttactacatgaaatgttaagcttaaacgtaagataatcccctaagatggagactcaagacatcaaaactttgatcattattgcacctatttttctacacaaaaaaaaaaaaaagaaagaaagaaaagaaaaatttacatcgtaatccacccaaaaaaagaacagacaggcgtaaaattcagactcattggcattgaacataacaaaatctacaatgaacatttttttgngaactgctgtcagcattacaaaaatgtgaaatgaaatttgcttaactataatcatgccaataaaaatccttnacaatcactttttcgnatggtttataaaangtcttaatatttccataaacanttntggggcaatttaatcaatggccaaaatccaaggttttncttaatcnttatggtatag

SEQ ID NO: 206 - DNA, 802 bp, Homo sapiens
  misc_feature (2)..(9): n is a, c, g, or t
  misc_feature (12)..(19): n is a, c, g, or t
  misc_feature (24)..(24): n is a, c, g, or t
  misc_feature (31)..(31): n is a, c, g, or t
  misc_feature (700)..(700): n is a, c, g, or t
  misc_feature (765)..(765): n is a, c, g, or t
  misc_feature (790)..(790): n is a, c, g, or t
  misc_feature (792)..(792): n is a, c, g, or t
  misc_feature (796)..(796): n is a, c, g, or t
  misc_feature (802)..(802): n is a, c, g, or t
  nbla-10474-f
gnnnnnnnnggnnnnnnnnttggnttcctcngcctgttggcctactggcgcattattttattcactgaagatccaagggtatttaaagtaacatatgaaagtgagaaagcagagttagcagagcaagaaattgcagtggcattacaagatgttggaatttctcttgtcaacaattacacgaagcaagaagtagcctatataggcattacaagttctgatgtggtttgggaaacaaagcccaagaagaaggcaagatggaagccaatgagtgtaaagcacgctgagaagttagagagagaatttaaggaatatactgaatcttctccttcagaagataaggttattcagttggacactaatgttccggttcgcctaacccctactggtcataacatgaaaattctgcagccgcatgtaatagctctacgaagaaattatcttccagcattaaaagtggaatataacacatctgcacatcaatcatcatttagaattcagatttacagaatacagatccaaaatcagatacatggtgctgtatttccctttgtgttttatcctgttaaaccttcaaagtcggtcaccatggattcagcaccaaagccctttacagatgtcagtattggcatgagatctgcaggacattccagatatcacgtattaagtatttcaaagtattgattcaagaaatggatctcangttacatcttggggttatctatgctttaacagaccttatgacagaactgaggtgactgaaatacngaggtgggccttttcataaaggatntngaanctttcn

SEQ ID NO: 207 - DNA, 810 bp, Homo sapiens
  misc_feature (1)..(2): n is a, c, g, or t
  misc_feature (5)..(5): n is a, c, g, or t
  misc_feature (7)..(11): n is a, c, g, or t
  misc_feature (15)..(18): n is a, c, g, or t
  misc_feature (21)..(21): n is a, c, g, or t
  misc_feature (23)..(23): n is a, c, g, or t
  misc_feature (28)..(31): n is a, c, g, or t
  misc_feature (34)..(34): n is a, c, g, or t
  misc_feature (647)..(647): n is a, c, g, or t
  misc_feature (667)..(667): n is a, c, g, or t
  misc_feature (694)..(694): n is a, c, g, or t
  misc_feature (726)..(726): n is a, c, g, or t
  misc_feature (783)..(783): n is a, c, g, or t
  misc_feature (801)..(801): n is a, c, g, or t
  nbla-10475-f
nnggngnnnnnttgnnnnccntntttgnnnnccnttgcactgttggcctactggcttttcagtcgggcgctgagtggtttttcggatcatgtctggtggctccgcggattataacagcagagaacatggcggcccagagggaatggaccccgatggtgtcatcgagagcaactggaatgagattgttgataactttgatgatatgaatttaaaggagtctctccttcgtggcatctatgcttacggttttgagaagccttccgctattcagcagagagctattattcccggtattaaagggtgtgatgtgattgctcaagctcagtcaggtactggcaagacagccacatttgctatttccatcctgcaacagttggagattgagttcaaggagacccaagcactagtattggcccccaccagagaactggctcaacagatccaaaaggtaattctggcacttggagactatatgggagccacttgtcatgcctgcattggtggaacaaatgttcgaaatgaaatgcaaaaactgcaggctgaagcaccacatattggtgttggtacacccgggagagtgtttgatatgttaaacagaagatacctttctccaaaatggatcaaaatgtttggtttggatgaagcanatgaaatgttgagccgtggntttaaggatcaaatctatgagattttncaaaaactaaacacaagtattcaaggttgggntgctttctggcacaatgcccgactgatgtgtttggaagtgcccaaaaatcatgaganatccaattcgaatctggngaaaaaagg

SEQ ID NO: 208 - DNA, 756 bp, Homo sapiens
  misc_feature (2)..(3): n is a, c, g, or t
  misc_feature (7)..(12): n is a, c, g, or t
  misc_feature (14)..(14): n is a, c, g, or t
  misc_feature (19)..(19): n is a, c, g, or t
  misc_feature (22)..(24): n is a, c, g, or t
  misc_feature (30)..(31): n is a, c, g, or t
  misc_feature (143)..(143): n is a, c, g, or t
  misc_feature (616)..(616): n is a, c, g, or t
  misc_feature (636)..(636): n is a, c, g, or t
  misc_feature (657)..(657): n is a, c, g, or t
  misc_feature (679)..(679): n is a, c, g, or t
  misc_feature (732)..(732): n is a, c, g, or t
  misc_feature (735)..(735): n is a, c, g, or t
  misc_feature (747)..(748): n is a, c, g, or t
  nbla-10484-f
gnngggnnnnnngntgggntcnnnttgaannccttggcactgttggccaggctggtcttgaactgctgatctcaggtgaaccacccacctcggcctccctaagtactgggtttacagtcatttttttaaaaaataaatcttgntctttggaagaccattaagaatagtcataaaatatccttacaaatagaactgctcaaaaaagaaactcaaaaactaaatttgagttcagtggcttctgagggtataccacgagtgaagtctcttatgttctcaacaagggagcgaacggcaaagccgcacacctgagggctcagtgctctcaggattcatggcctggcttcctgctaagtggtagcaggtccctctctttcatttggactgagtgtccaaagtgcaagtggattaggagccagggagatcctccatttttggtgttttggtttaaccaatagtcctaggagcttagcacacctggggtgtcaccttttgcttgtgtttgtgaacctctcttatcagggacaagaaccatgtgtccatctagctgcaggcctctagggtggggacagtatccatcaagacagggattcccatggtgcaaatgatggctcttctncttcgacacatctgtgctgnactcaagccatttgtcaaggntagcagagcctgggggaagcantgtggaaagagctgcttcggagatagcttgggcccaagtctgaatcctggctntgntgcactttccannccaatgac

SEQ ID NO: 209 - DNA, 751 bp, Homo sapiens
  misc_feature (2)..(2): n is a, c, g, or t
  misc_feature (5)..(5): n is a, c, g, or t
  misc_feature (11)..(12): n is a, c, g, or t
  misc_feature (20)..(20): n is a, c, g, or t
  misc_feature (29)..(30): n is a, c, g, or t
  misc_feature (33)..(33): n is a, c, g, or t
  misc_feature (470)..(470): n is a, c, g, or t
  misc_feature (562)..(562): n is a, c, g, or t
  misc_feature (648)..(648): n is a, c, g, or t
  misc_feature (660)..(660): n is a, c, g, or t
  misc_feature (672)..(672): n is a, c, g, or t
  misc_feature (680)..(680): n is a, c, g, or t
  misc_feature (706)..(706): n is a, c, g, or t
  misc_feature (730)..(730): n is a, c, g, or t
  misc_feature (749)..(749): n is a, c, g, or t
  nbla-10484-r1
gnagnggggtnngtttgggnctttttgannccntttttagacaacagaaatttatttctcacagttctgaaggctggaaagtgccagatcaggtggccagcagatctggtgtttgatgagggctctctgcttcctaaataatgttttcttgctgagtcttcacatgggagagggaggccaggcaactccctccaacctctcctataaggctctaatctcattcatgagggttccaccctcattccctaagcaatttaatgccttcccaaaggccccacctcttactacgatcgctttgggtattgggttctgacacatacattacctcatttactttcaaaatagtagtgtgggcatttttaaaaactataaaatatttcatgcataaaaaacacacactatatatattaacagttaaagaataaaatgtctgcttccaccacttagaaagagatggttacaaacacctntgcaggctcgcgtctgttcccaaacacatcctttccacactcatcccagacaaagttactgccttaaatttgagattatcaggactcactgntaggagctggagacaagcagcgggcttcccactcatggaagaggctgaaacaaaacaaaaacaggtatggatccctgacaactacngagtggaggctnacagcaaactgnaggcccanggtgggggcaccgtaccatgggcctntgaaaagccagtcaccctggcttntggacctgaatctgcaagngg

SEQ ID NO: 210 - DNA, 2038 bp, Homo sapiens
  nbla-10485
gtacggaagtgttacttctgctctaaaagctgcggaattcctcgagcactgttggcctactggaaagatgcttgaaagataaatacgtttaattaggggcagaggatgatcattaaaggaagtctgactgctgcagaagtcattaacaatcttaaatgaaatttttatttttatgatagccatttacatgtataataagagccaatgattcttgggagcagtgtgacagaaacagagtgtggcgagaactcatgtaagacatactatttaaatgagctggtgttagctattcatatttgttaatgaactagatatgcagggctataagaatgaatgttctgatgctttaaattttaatatctagaaatcaagggtaaggaccaattactagaatttccacccttagaagaataattaataacaatgtaacaaatgtacagccccaaacctcttttaaaaaagtttaatttaaaaaatttaatatcaatagttgaaaaacagccaaacagcaatgtcaagctgtagtagtttgtgattgtggcagctttttgtgttggtcatggatcataattctaaacgttttaatatacagtaatccatatgaatgcattgcagaccctgttatcacctgtagttaatggtgcctgtgatacaagtgaacaggctgttctttgctcttacctttatggtaaataaaccagcattctggagtcacaataattaaataaaatgtaaatccctaatctcatttggctatttggaccaagaaacttacccggctattacctgtctagttctaatgattactaatgatttattgttctttttttttattgttctaaaagtgctctgatgtggtgccttgatgtctaatgaaaagaaattggtcttaaaaagctactcattgtttatcctgactctgagataacacatttttcttctgataaaatatttttcttatttattgttcaaaacacacaatatagacaataactctaattctggtgcagttttatttagtagtgttttatccccggtgcctggctgtctacagtcatacctcagcacatagctttactctgagataagccctctctcctttgctctttctcccatgctttctggagtttgtctgcaggatgcaggttttgaactgaagagcgcagtggagttcttactgtgcctttccggttccagcacaatcaaagttttgtgtttggaattgtccttgacattctttcgtcccacaatggggtggacacagtgtgctggaaaccatgacatcattatcattgacacagacttaaataaatcacctgcatcttggcctctttctgcttattcaaggattcttcatcttaaggaagaaagtgctctttatttttacaaatcttcatcccaggggtgactggaagacgcaaacttttacaagtgttttaaaaataaatatactatgtggttttagacacagtatgctgagtcagaggtgtcttagagaatgtttaaggttagacataaggcagaaagacagccagattgcctttaattcggaggcaatattcctaaactgtgtatcattatgtccttctgaatatggattcacttgaaacttaattaaataggcatatacataacatttcaaatacatacctgaaaaggcttagtagtgtttcattttcacacattgagcttgatattcaaaaaagaaaaagattgatgctcagtgaatcaaagcaaagtactttctaggtaaaagtgacaccatctcatccaatgtctctgaaagatctcagttgcacagtctttggataaaaagggttataactaaataatactacaaaatgcaatttacacaatgtgctgactacacatttgtatacccagcatttattaatttgggaagcaaccaactactgtaacttctctttactttttcataagaaaatgacaatgaggaaggaagtgcagcagaaatcttgaacattaccactattatgcaaaaaaaaaaaaaaaaaggccacatgtgctcgagctgcag

SEQ ID NO: 211 - DNA, 1690 bp, Homo sapiens
  nbla-10500
gtacggaagtgttacttctgctctaaaagctgcggaattcctcgagcactgttggcctactggagtgttttttttttgttgtttttttaaacatttcatgggtttgtagatttttggaaataatttcagttaatctcagggcttcccaaaccttgaaatggttaaacaccaaccactgcttaacttggttgttgtaaacaaagcccgaaatgaaacccctgtgtatttgctgcagattcccaggtgcctcttaagtgtgaggataagctcagaaaaggcttaataggtttattaagttgtcatccattaaaaggttcacatgctccttgtgtgttgcataaggacaggtgtctgccacctcattgcatttctcactgagcattgcctaggagagggtaagccctaggatttagatccctctcagatgttcaggcagaataattttgtcaggacaaaagtaaggtcacggaactatatgaaaatggattatgaatcctaagacatcagcctattctcccctatgtctaagaagaatattcctcagcttatgactggaatgtcttgctaggggtgctgggtaagttttgtggaggtccccaccagcagaaaaaaatcattgaagaggaacacttaattcacaatggctgctgattaaaaagaaagcctcaatattcacctataaccctaacatccttaacagcttagcagtgtggtaactggcacaaactatggcgtcttggtcaaatccaacctcagtgaaggtagttcacatcctagagatgagctgaatgctgatagctttgaggacttgtttatttgggggaagggaaagagatggtgagggtagagataggaatctgtctgtcgtaataggatttggtctgtgtattaatggaatgaactggccttttttgctctgcttcttttgtccttgctgagaagggaggctgaagtttccaagagttatggatgaagttggagagtattagaggaactgttctctgaccttcttgatggtaatgcaagctgttgggcgagtttggagaagagcgcagggtggtgtgaggacgagggccgtattaacattttgccttaaaacaggaatacacaaattaaagcaataactgctactctgctttcttgtttctgcaatcttctgtcatttgacattgttttttccaaagcaacatgcgaccattttcttcaggattttcttttcagttatcatatgggtttgttgttggattgagaaaaaaaaatctgcctcatttgagcaggcctctctagatcttttcttatgactgtgtagagggtacttcctcatttttcttcctctcaaagacatcaaattcccgagcatttaactaaaattattatcaactaaaaatgttttttttaaaacagttcttagaggtaactgtttagacttaattattgaaatgcatgaaggccttctgccttgcccccatcccactcttttgcctgcctctctcaccaacaaaaacatggcagaggaacagtttattaacaatagcctgtttgaaagggaagcttcagtttttagctaattatttgctaataaaagttttaaaaaaattttcttttaaaagttgtaaaacctctgtctatatttcaaaacccctcaataccaaaaaaaaaaaaaaaaaggccacatgtgctcgagctgcag

SEQ ID NO: 212 - DNA, 1965 bp, Homo sapiens
  nbla-10512
gtacggaagtgttacttctgctctaaaagctgcggaattcctcgagcactgttggcctactgggagagaattcatacaggtaagaaaccctatgaatgtaaggagtgtgggaaagcttttagtgtatgcggacaacttacccgtcatcagaaaattcatactggtgtaaaaccctacgaatgtaaggaatgtggaaagacctttagacttagtttttaccttactgaacacagaagaactcatgcaggtaagaaaccttatgaatgtaaggagtgtgggaaatcatttaatgtgcgtggacagcttaatcggcataaaacaatccatactggtataaaaccttttgcatgtaaggtgtgtgagaaggcttttagttatagtggtgacctcagagtacattctagaattcatactggagagaaaccatatgaatgtaaggaatgcgggaaagcctttatgcttcgttcagtccttactgaacatcagagacttcatactggtgtgaagccctacgaatgtaaggaatgtgggaagacctttcgagttcgttctcaaattagtctacataagaaaattcatactgatgtgaagccctacaaatgtgtacgatgtgggaagacctttagatttggtttctaccttactgaacaccagagaattcacactggtgaaaagccctataaatgtaaagaatgtggaaaggcctttattcgtagagggaatcttaaagaacatctgaaaattcattctggtttaaaaccctatgactgtaaagaatgtgggaagtcctttagtcggcgtgggcagttcactgaacatcagaaaattcatacgggtgtaaaaccatacaaatgtaaagaatgtgggaaggcctttagtcgtagtgtagaccttagaatacatcaaagaattcatactggtgagaaaccctatgagtgtaaacaatgtgggaaggcctttagacttaattcacaccttactgaacatcagagaattcacactggtgagaaaccctatgagtgtaaggtatgtagaaaggcctttagacaatattcacatctttatcaacatcagaaaactcataatgtaatttaatataagaaaaggtttccatgtcatgctctatttatagaatatcaaaatatttatggccagaagttctgtcaatgtgttgatgtttttttacacatattaacttaataaatgtatgagtcttaaatacctcttagttctcattaaatttaggaaaattcacactagaaaataaagctgttaatgtaacagttgtggagaagtgttctagcaacagcatatacttatcatcattgcctttccactactctactatctgtgtgatattagacaaaatatttgcttcttggtacctcagctgtaaaatgaaacacacctaaaagtgtggttgtttccaacatgtataatacagcaacaactatctggcccaaactgctttggattaatattggatattactgtttttattatcatcaacattattattagtggatttcttaataggaagatgcaatggagatgacaaatttggaaaaaccactcatcacttacatttcatgaagtacttctttgataaaatctgttatgggctgaatgtttgtgttcccgtaacaattcctatgttgaaacacgaatcccaaggtgatggtatttgaaggtagggcctttaggaggaaattaggtcatgagggtggagccttcatgagtggaattactgcctttataagaagaagccaaagagccagctagctctttcaaccacatgaggttacagcaagaagtcagcagtctacagtgcaaaagagggccttcaccagaacccaagcatgctggcaccttgaccttggactttcagcctccaaaactgtgagaaataaacctcagttgtttataaaaaaaaaaaaaaaaaggccacatgtgctcgagctgcag

SEQ ID NO: 213 - DNA, 1980 bp, Homo sapiens
  nbla-10520
gtacggaagtgttacttctgctctaaaagctgcggaattcctcgagcactgttggcctactggcaaagcaggttattcagtgattcctccccaccattcttaagaacgttaaataatgctgttgtgttagctctgagtagaaaggaaaaagtaaaacctctgtttggaggtaatattgggttgaattctgactgcccctttctagctggacctttaacaaatcacccaatcttttttgtgtttctctaaagtcatttatacattaaatgtaattatagcaactgtggggttctgttgagaattaagagctaacactatatatgtaaagtttccagtactagtcccagaatttagaatatgctcaacacaaagtaaacagcattatataagtttatatttttgtgagttataaagtactttgatatattctcattaaatctgtaaatcacctctataagtaagtggtaataataaagcagatatttttgtccccatttaaaaaatgaagaaattaatgcttaatagggtggtaccctggaaaggatctgggaagtggtagaatttctggtctgtacttttacaaatggagcccttgggaggtgggttaggtaaaagaagctttttacttaacgttgtcttatttccagtctaattttacgctgtagcagaaccagatggctgagaaaattctggaactatggatcttgaccccaaggatatattattttattccaagaaagatcaggtaggcgaaaagatgacaggatacagagtcaatccataaactaaatatttataactgttctgaattatacagagtctaaaaatatgtgtcagctacttcattcctgtaaatactcttgctgtgttataaatatggcaagaaataaacatgaccaatatcaatagacttcttgaggctactataagttttgagaaataaggttcaaaaaataagaatgctaacacttaagcacagactagagcttgcttgggtttcttcctgcattacaaggtaaaaatttgttaatgtttgtttttattcagcttgggaaagctttgtgccatgaatacgtcgcatttaataacaagcaacacacggcatatagaaataactttaattaaaaaacttacatagaagattataatatcagacgtgacaaagatttgagtttatttgcctggacaacttgggtttgtctggcttttgttttctttttctttaaaaataaatgtacagtaaaactacaagcaaaagtttgtcagtattgaattgaattttttaccccttaaaaggactagtataatttccaatctctaacaaaaacttagtgtcaaatctcacagataaggccaaatggccaatattttcagttatgtgggtagtacaacttgagtaaccttttttacatgacaaaaagtgagttatataaattgtcctcaactttcacataggaaaaaaatggtttaatagcttcaaaaggaattttctttcatgtatactcttcagtatccaatattgaagctttgttctttgaaaaattttaatttccaatctaggatgcaagcaagaatatatgtttatttgaatagagtaagctatggcaaagaatgaccaaattagctagaaatagaaatcagccagaattaactaatttcttgctaatctagaaatacaatcatcttttttttttttcaaattttatactgatagggctttactgtttgtggctcattttaaaactggtgtcttctcttcatgagacacattaattggtaaaactcaaattgagttttcaaagatgtgatagtattaaagtgcaccaatatttgactcaaatttgcttgctttattttgttaggagtaaacagaaagtagcctgtgtttagtcccaaagatagcagtgattttgaataaaggagttttgtgttgcctggaaaaaaaaaaaaaaaaaaaggccacatgtgctcgagctgcag

SEQ ID NO: 214 - DNA, 772 bp, Homo sapiens
  misc_feature (2)..(4): n is a, c, g, or t
  misc_feature (6)..(7): n is a, c, g, or t
  misc_feature (13)..(13): n is a, c, g, or t
  misc_feature (16)..(19): n is a, c, g, or t
  misc_feature (25)..(25): n is a, c, g, or t
  misc_feature (37)..(37): n is a, c, g, or t
  misc_feature (573)..(573): n is a, c, g, or t
  misc_feature (614)..(618): n is a, c, g, or t
  misc_feature (649)..(649): n is a, c, g, or t
  misc_feature (739)..(739): n is a, c, g, or t
  misc_feature (748)..(748): n is a, c, g, or t
  nbla-10522-f
gnnngnngtgggntcnnnnttgaancccttggaatgncccctactggactgaaatatcagctcatagaaagtaacaaaatttgctgtcaccttaaataagacattttaattttgttataatgtacaatttagaagtttgattaattatattatctatttaggcattaatataaaagaggtaggagtctgttatttaaaaaaagcattaaatttaaaaaaaaactgtcttgtctacttttagcttcattctcccatattttgaagggtgtgtaacttcagctctgcaggattgcatggggtaaaacttgttaccaacacatgtgaaccattgctacattgtaggttgtgatcattttgccccactgaagcccatgtatctgaccttacgtgccttttgaactaggagaatcgggctaatttattaatgatgataattataatgtatctgtacagcactttttacatttgcgaagtgctttccaatccatgttagttactaagttattacagctgtaaggataaaacacgtcatgtggattcattttgaattggtgctattggtatttcctctgntattgctaataaatgaaaatggtggtatgaaaaaaaaaaannnnnaaaaaaaaggccacatgtgctcgagctgcangtcgcggccgctagactagtctagagaaaaaacctccacaccttcccctgaacctgaaacataaaatgaatgcaatggtggtggtaactnggttattgnagcttataatgggtacaaataaag

SEQ ID NO: 215 - DNA, 769 bp, Homo sapiens
  misc_feature (4)..(4): n is a, c, g, or t
  misc_feature (8)..(8): n is a, c, g, or t
  misc_feature (10)..(11): n is a, c, g, or t
  misc_feature (18)..(18): n is a, c, g, or t
  misc_feature (26)..(26): n is a, c, g, or t
  misc_feature (28)..(29): n is a, c, g, or t
  misc_feature (516)..(516): n is a, c, g, or t
  misc_feature (539)..(539): n is a, c, g, or t
  misc_feature (566)..(566): n is a, c, g, or t
  misc_feature (664)..(664): n is a, c, g, or t
  misc_feature (684)..(684): n is a, c, g, or t
  misc_feature (741)..(741): n is a, c, g, or t
  nbla-10522-r1
gagngggntnnatttgancccttgtnanncctttttttttataccccattttcatttattagcaataacagaggaaataccaatagcaccaattcaaaatgaatccacatgacgtgttttatccttacagctgtaataactagtaactaacatggattggaaagcacttcgcaaatgtaaaaagtgctgtacagatacattataattatcatcattaataaattagcccgattctcctagttcaaaaggcacgtaaggtcagatacatgggcttcagtggggcaaaatgatcacaacctacaatgtagcaatggttcacatgtgttggtaacaagttttaccccatgcaatcctgcagagctgaagttacacacccttcaaaatatgggagaatgaagctaaaagtagacaagacagtttttttttaaatttaatgctttttttaaataacagactcctacctcttttatattaatgcctaaatagataatataattaatcaaacttctaaattgnacattataacaaaattaaaatgncttatttaaggtgacagcaaattttgntactttctatgagctgatatttcagtccagtaggccaacagtgctcgaggaattccgcagcttttaaagcagaagtaacactttccgtacaggcctanaagtaaaggcacatcactgnggagcagtctttgatttgaccaccaccggaatccgggcctggaataaaagaccaaangactaaacttccagttaacttttgggtt

SEQ ID NO: 216 - DNA, 2755 bp, Homo sapiens
  nbla-10535
ttctaggcctgtacggaagtgttacttctgctctaaaagctgcggaattcctcgagcactgttggcctactggcgtacggtgttttcttgtgcattgactgttccggggtgcaccgctccctgggcgtccatctgagcttcatcaggtccacagagttggattccaactggaactggttccagctgaggtgtatgcaggtcggcgggaatgccaatgcgacggctttttttcgccaacatggatgcacagccaatgatgccaacaccaaatataatagccgagctgcccagatgtaccgggagaagatccggcagctggggagtgcggccctggctaggcatggcactgatctttggatagacaacatgagtagtgccgttcctaatcactccccagagaagaaggactctgatttcttcacagaacacactcaaccccctgcctgggatgcgccagccactgagccttcagggacccagcagccagccccgtctacagagagcagtggcctggcacagccggagcatggccccaacacagacctgcttggcacctcacccaaagcctcactggaactgaaaagctccatcattggcaagaagaagccagcagcagctaagaaagggctgggtgccaagaaaggcctaggggcccagaaggtgagcagccagagcttcagtgagattgagcggcaggctcaggtggcagagaagctccgtgagcagcaggcagccgatgccaagaagcaggcggaggagtccatggtcgcctccatgcgtctggcctaccaggagctccagattgatcgtaagaaagaggaaaagaagctacagaatctggaagggaagaagcgagagcaggcagaaaggttgggcatgggcttggtatcccgaagctctgtctcccactccgtgctgtctgagatgcaggtgattgagcaggaaaccccagtgagtgcaaaatcctctcgctcgcagctggacttgtttgacgatgttggtactttcgcctctggacccccaaagtacaaggacaatcccttttccttaggggaaagctttggctcccgctgggatacagatgctgcctggggtatggacagggtagaggagaaggagccagaagtgaccatctcaagcatccggcctatttcagaaagagccacaaaccggagggaagtggagaaccggagctcaggcctcgagtctagtgaggcgcgtcagaaattcgcaggagccaaagccatctcatctgacatgttctttgggcgggaggtggatgcggagtatgaggccaggtctcggctgcagcagctctcaggcagcagtgccatcagctcttcagacctctttggggacatggatggagctcacggagcaggaagtgtatctctggggaacgtgctgcctacagcggacattgcccagtttaagcagggtgtcaagtctgtggctgggaaaatggctgtgctggccaatggtgtgatgaattccttgcaggatcgctacggttcctactgatccgagctctgtgactcaggcttacgatggtgacggcaacaagaactccacagttcccaggctggggatgctttgccttgtggaagctggggaggatttgttacttcgtatgtgtggtgtgtgtgtggggtggcctttgaggcgctcactcctgtgaggggaatggtcagtaccagcccttgtcctctgcctgtggactgagccctttattccctctcacaccaccctccgtgtgttagactcttgtccttctgtcctgcccccacagctgctgctcacttatcctgccatactgggaaagggggttcccccacgatggcttattctgggtccagactttccccaggtagggaaagcggaaggtagaaggctttttttgctggctctagggttcttctagttcgaggccttgggtccccatcctctggaaccagggggaggcctggaaggagttcactgtagacccgtcccatggggaaagaggctgcggacttgctgctgctgctgctgccagtggcctcttctgggtgccaggagaggggaaggacctttgtctgggcgttaccaagggctggaaactttacctggtacctaaaggtttcatttggtatcagaccggagacccttgggttctcccgtctcaccacccctttctacagtaagcacttggaagattgtttcagggtgtctcagggtccctctgtaccatctgctgtggaatgcaggaccctctgtgacattctttatcccttcttccccgggttggtggccatggagggtcttgtctgctgtgattcgactctggatgctgtgagcttgatgctggccagggaagcagaggatgtgagaggcagaggcaggctcctggggctgagctccttcctctgcatcattctgggcttggcctggacagcacccgccagtgagagctgtgggcctcaccctctggcagctgagccaagcactgtcattcttggtgccatcttcccctgccgcaccggcagtctcagcccagcccccacctttgggttgtaggttgggctcccaagcaacacagaccactcttccccttgcccctcccccagagggacttgactttctttctggactgtttgtattgaaacaaagtggtgtcaaaataaagcccctgcagggcctggctccctgttggtctgagtgaaaaaaaaaaaaaaaaaaaaaaaaaaaaaaaaggccacatgtgctcgagctgcag

SEQ ID NO: 217 - DNA, 2100 bp, Homo sapiens
  nbla-10545
ttctaggcctgtacggaagtgttacttctgctctaaaagctgcggaattcctcgagcactgttggcctactggcagctttttgtttttggcctgaatagaacaagacaatttacctatgtgaaaacctgagtgaaagcttggggtgtgatatgttaagtagaacagtattttaaagccactttgattcataagtttctttaacataaacaggttgtattgcctcttgaaaaatgataggttctatggataacatttaattagctttataatacatatgatgatttaacctgaattaatggtactactttttctgacttccttttgatcttggccctttctctgtaaagttttttgttaacttattacaaactgaaccctggcttgctcctcttatctttagtctcctttcaatctgtctttatttctgctgaggttatattctatttgtttttcagatgagaccctttttgctcttcctgctgcatctgagcctgtgatacgctcctctgcaggcaagttctttctgccagccttttatcctctctgtattctaactttaactctttagtgtgttaacactatgcagagtagtttgggtttactaaaaattagcatggttccgagaatgttttgtctactggaaaagttgaaatgtgcattttatatggtatgcccaagggaaaaatgagcaaaatctgatgaatacttggaagtacataaggaattcttggacccttgaattacatttacatatttaccattccctttctccaaatacagtttgagtatagccagaaaggctttcctgtaaataaataccagtctatggcatttacccagtgccccttctttcctatgctgtcaccgaaactcttttcacagatattcttctcttctctaaaactagctattagtatcttagttgataacatttgaggtttactcagacttgatttgtctttgcacagcatgtaattgcctctgtagccatgcatatgttatatttacaatagcttaatattttcagtaatgattgaagtctactctattgttacttattaattgctattaacatttcattttagtaaacagtaagtctttactaacactattttggatctgtcataaaacttgcattaactctgagaacactggcattctctaactttcctttctgtccatggtcacagaaaatatggacttgaaggagcagccaggtaacactatttcggctggtcaagaggatttcccatctgtcctgcttgaaactgctgcttctcttccttctctgtctcctctctcagccgcttctttcaaagaacatgaataccttggtaatttgtcaacagtattacccactgaaggaacacttcaagaaaatgtcagtgaagcttctaaagaggtctcagagaaggcaaaaactctactcatagatagagatttaacagagttttcagaattagaatactcagaaatgggatcatcgttcagtgtctctccaaaagcagaatctgccgtaatagtagcaaatcctagggaagaaataatcgtgaaaaataaagatgaagaagagaagttagttagtaataacatccttcataatcaacaagagttacctacagctcttactaaattggttaaagaggatgaagttgtgtcttcagaaaaagcaaaagacagttttaatgaaaagagagttgcagtggaagctcctatgagggaggaatatgcagacttcaaaccatttgagcgagtatgggaagtgaaagatagtaaggaagatagtgatatgttggctgctggaggtaaaatcgagagcaacttggaaagtaaagtggataaaaaatgttttgcagatagccttgagcaaactaatcacgaaaaagatagtgagagtagtaatgatgatacttctttccccagtacgccagaaggtataaaggatcgttcaggagcatatatcacatgtgctccctttaacccagcagcaactgagagcattgcaacaaacatttttcctttgttaggagatcctacttcagaaaataagaccgatgaaaaaaaaaaaaaaaaaaaggccacatgtgctcgagctgcag

SEQ ID NO: 218 - DNA, 1815 bp, Homo sapiens
  nbla-10570
gtacggaagtgttacttctgctctaaaagctgcggaattcctcgagcactgttggcctactggatgcatttcgaaagcaaacagaagaaaaaagtatattctcacagtttttccccaggaagtctggagaaaaagtcctcatgtcaccaatttctctgttgcatgaattttagtgttttgctataagacagcatgagggctatcaggccaaaattcattattgtatttccaatacagtttgtcttgaatgtctgtctcttaaaccagtttttacttgtcagttttctctcagcaaacagtcttactattatgtggaatttaacttttcagagaaaatttccaaagtcctctaccttatttggcttttatctgtgtcttttggaaaaggagctgcatggcctcagtgcctccataaaaagcttaagttgagctcatgggagaacattaagatcgttttttttcccttttagctcggtaatctcatgtaccacaggtaatgaccaagcatctctgctagaggatgtacctctcataactcctgtgtaaaatgaggatcctgttggtgatcctcattccagtttccaaagcgagaggagccttctgagcagaagtatgcaagactgattctgtttggaacagtttcctatttggctgcattctaggaggcctcctgacttattcatagtattgtcgcctggtggcattggtgtggcgtagcttgtcctgctacttgctaaagttctctttctttgagaaaactgaggaaccagaatgcttagagttcataaaataatctctaaaccatgttaggttaaaacaaaatgaccatctcacaaaaacgagtttagttgaatgctcaattccttacaaaatcttcatttaaggctgagtgtggtggctcatgcctgtaattccagcactttgggaggccgaggcaggaagactgcttgagcccaggagttcaagaccagcctgggcaacataggaagactctgtctctacatagaaattttattataaaagtagctggggatggtggcacacacctgtagtcccagctactcaggaggttgaggtgggaagattgcttgagcccaggagtttgaggttgcagtgagctgatcatgccactgcactctagcctaggctacagagcaggaccccatctccaaaaaaaaaaaaaaaaaagtcatttaaaaactgaagaatgttctcttcttgctcagttccctaaattagctggggggattgggatactttacaatttttacatttttaaatttgaagaatttgttttaaacttacttggtaatggcacttctacttactgaccaacttttcagctctttttgaccaggatggttgcaaattagggaaaatatctttatactatacatccaattcaagaggactttaattacttaaaagcatttaggtcataattaaaattattttcactgtttccataaaataagcattatgattgcacactccttctactgtctgaatttatgtaagaggtatagcttgcttaaaatacatatatatgtaaagttatattttcttagaaacatggatgtttacagccattgctttcaaagagattattactgtgtattctccctgttttacaatatgttttcatgaagactatgttacaccagaggcttctgattatcaaagtgataaccagttttaactgccggtatgtaccagatttgtgaactaatttaaaaaaccacaaactatgaataaaatggggtttgcaaactaaaaaaaaaaaaaaaaaaaaggccacatgtgctcgagctgcag

SEQ ID NO: 219 - DNA, 730 bp, Homo sapiens
  misc_feature (2)..(5): n is a, c, g, or t
  misc_feature (543)..(543): n is a, c, g, or t
  misc_feature (597)..(597): n is a, c, g, or t
  misc_feature (636)..(636): n is a, c, g, or t
  misc_feature (658)..(658): n is a, c, g, or t
  nbla-10594-f
cnnnngcctgttggcctactggttgactttctatttgacaagtagttataattggcaagcagtttgagtttatactcatgacatactgaaagcatctctttggggtcaagaaagaatccctagtggatttgggattctagaggaggtgttataattaattattcagaaaaatgcatgtatttacctcttcaaccaaaagggcagtaaagaatagggataatatattttaatgtaaatttggaagaaggataaaatcacccacagttactctccctattattttcactgggtcaagttttaatcttttggcttcatgagttccactccctttgatgatatatgttgtatatttttagttgtaaagcagtaatctttaactgtagcattcctctaattataaacagtgaaaaatcaaaatcagtccagagttcttttgttgacttaattcctgatcagtatagacaggactatatatatttaatcagagaattacattatatctgaagatggagctcaggagaatgcaccaagactttgaattgnatttacattcactgtcagtaaagacctggctacgctttgagaaatcaggatctnctaggccattgcttcgcaactgtgattactgaaatcctnctcataggagataaagtccgangggtagagtccaagatgtcaccttggaatttctttggaagtcacatgtttatccttaaaatattcttattta

SEQ ID NO: 220 - DNA, 763 bp, Homo sapiens
  misc_feature (2)..(3): n is a, c, g, or t
  misc_feature (5)..(6): n is a, c, g, or t
  misc_feature (8)..(14): n is a, c, g, or t
  misc_feature (17)..(17): n is a, c, g, or t
  misc_feature (29)..(33): n is a, c, g, or t
  misc_feature (695)..(695): n is a, c, g, or t
  misc_feature (715)..(715): n is a, c, g, or t
  misc_feature (726)..(726): n is a, c, g, or t
  misc_feature (748)..(748): n is a, c, g, or t
  misc_feature (750)..(750): n is a, c, g, or t
  misc_feature (761)..(761): n is a, c, g, or t
  nbla-10594-r1
gnngnngnnnnnnnttntgggcctttttnnnnnctttttttttttagcactttctacaaaaaatgctttatttaaaaatatgatctttttaaaaaggagacttttatacacacttactttagaaacagtcaaaaacacaacagaatcaatccagatttagaaatgatgatttgtaacatacaatattggtatgctgaacaagacagtttaaatgtatgattctttttgtcccttcacatttcaataattcacatttgttaaaactagtggttgggactaaagaaaaggtcatatctgaatcctttccccttcagaaatctgtcacccttctgggcagttacagaaatggcagcagctaggcaatgtttgtatttctttgggtgcctctgtgtcaaaaaatatatctccgcttttattctttttctatgaaatttatatttatgtggctatagggcctggtcgtatgtcccacgccttttaaaatctaaatttctaaaaacagacactccgtaagggcaaggagcatacactgctatgacctcactggactcagagcttaatgctcttaggttatcagcaagagacatgattttgatcttccagttagcactccaagctgctatcaaccaacctttttcagcacggtagtgaaatatttcaaaccatattcaaacatctaatatagatttataatnaaacaggaaaaatggcttgncaaattaaagngctatgagcttttacattcaananggtatcttgantt

SEQ ID NO: 221 - DNA, 797 bp, Homo sapiens
  misc_feature (410)..(410): n is a, c, g, or t
  misc_feature (466)..(466): n is a, c, g, or t
  misc_feature (472)..(472): n is a, c, g, or t
  misc_feature (509)..(509): n is a, c, g, or t
  misc_feature (523)..(524): n is a, c, g, or t
  misc_feature (538)..(538): n is a, c, g, or t
  misc_feature (546)..(546): n is a, c, g, or t
  misc_feature (562)..(562): n is a, c, g, or t
  misc_feature (587)..(587): n is a, c, g, or t
  misc_feature (592)..(592): n is a, c, g, or t
  misc_feature (596)..(596): n is a, c, g, or t
  misc_feature (639)..(639): n is a, c, g, or t
  misc_feature (641)..(641): n is a, c, g, or t
  misc_feature (643)..(643): n is a, c, g, or t
  misc_feature (653)..(653): n is a, c, g, or t
  misc_feature (658)..(659): n is a, c, g, or t
  misc_feature (671)..(671): n is a, c, g, or t
  misc_feature (674)..(674): n is a, c, g, or t
  misc_feature (676)..(676): n is a, c, g, or t
  misc_feature (678)..(678): n is a, c, g, or t
  misc_feature (683)..(683): n is a, c, g, or t
  misc_feature (693)..(693): n is a, c, g, or t
  misc_feature (708)..(708): n is a, c, g, or t
  misc_feature (710)..(710): n is a, c, g, or t
  misc_feature (712)..(712): n is a, c, g, or t
  misc_feature (718)..(718): n is a, c, g, or t
  misc_feature (726)..(727): n is a, c, g, or t
  misc_feature (735)..(737): n is a, c, g, or t
  misc_feature (751)..(751): n is a, c, g, or t
  misc_feature (753)..(754): n is a, c, g, or t
  misc_feature (756)..(756): n is a, c, g, or t
  misc_feature (765)..(766): n is a, c, g, or t
  misc_feature (768)..(769): n is a, c, g, or t
  misc_feature (772)..(772): n is a, c, g, or t
  misc_feature (778)..(778): n is a, c, g, or t
  misc_feature (793)..(793): n is a, c, g, or t
  misc_feature (796)..(797): n is a, c, g, or t
  nbla-10623-f
gcactgttggcctactggcgatgggcgagtagtcagcaacttcatcctgcaggcgctccagggggagccactcacggtatacggatccgggtctcagacaagggcgttccagtacgtcagcgatctagtgaatggcctcgtggctctcatgaacagcaacgtcagcagcccggtcaacctggggaacccagaagaacacacaatcctagaatttgctcagttaattaaaaaccttgttggtagcggaagtgaaattcagtttctctctgaagcccaggatgacccacagaaaagaaaaccagacatcaaaaaagcaaagctgatgctggggtgggagcccgtggtcccgctggaggaaggtttaaacaaagcaattcactactttcgtaaagaactcgagtaccaggcanataatcagtacattcccaaaccaaagcctggcagaataaagaaaggacggactcgncacagntgaactcctacttttaggacacaagactaccattgtncacttgatgggganngtattttttggctnttttttgntgtcgtttaatgaaangactttacaggcgtcatgaagaacnaactnggantttcattctgaagttggctttaatgaaatggatgtgccctaanancntcccttgaanaactnnagaattttgccntgnancntttgnaattttcctnttttgtaaaatagcntnantccatnttttgcgnntttgtaannntttttattttgctngnnanagcattttnngnnctnccgttnacagtcttatttaantgnn

SEQ ID NO: 222 - DNA, 811 bp, Homo sapiens
  misc_feature (2)..(2): n is a, c, g, or t
  misc_feature (8)..(12): n is a, c, g, or t
  misc_feature (34)..(34): n is a, c, g, or t
  misc_feature (598)..(598): n is a, c, g, or t
  misc_feature (664)..(664): n is a, c, g, or t
  misc_feature (695)..(695): n is a, c, g, or t
  misc_feature (703)..(703): n is a, c, g, or t
  misc_feature (717)..(717): n is a, c, g, or t
  misc_feature (723)..(723): n is a, c, g, or t
  misc_feature (726)..(726): n is a, c, g, or t
  misc_feature (733)..(733): n is a, c, g, or t
  misc_feature (772)..(772): n is a, c, g, or t
  misc_feature (791)..(791): n is a, c, g, or t
  nbla-10623-r1
gnaggggnnnnnttgggcctttttttttttttcntgactggtgagtttcaatattttattaaaatagcatatttaaccatggttaaccaagaatatgttaactttgtgccccccaacctgcccccgccccagatacgcagcaaaacacagtagtgatttcaaatatccttgatcatgaccaacaggaatatttcaaagtcaagtttgcaactcaaaagtagaccttggaaaaactctgaattaaaagagaaacataaagctctcacacagaattcttttatctgccctaaaatcaatgccggcgcaccaccacctgacaatactgctaggatttttctttatgcatagtataacgacttatttattaagtacccacttttataaataaaatcggcattttttgtcccgcttaatgttccttttcagcttcacaaagaaaccagtaaataaaactgtcaacgacagtcacaacatatgctctcacagcaagataaaaaaacttgaaaatacgcagagatgcatctacgctattttacataaaaagagagattcaaaaggtgcaaggcaaaatctgcagctttttgaggggagcttttangcacatccatttcattaaagcaagcttcagaatgaaattccagtttggtcttcatgacacctggtnaaggctttctttaacgaccaccaaaaaaagnccaaaatncttccataagtgtncatggnagncttgggnctaaaagtgaggagtcaactgtggcgagtccgcccttcnttattctggaggctttggnttgggatgtccgatatttgc

SEQ ID NO: 223 - DNA, 825 bp, Homo sapiens
  misc_feature (1)..(4): n is a, c, g, or t
  misc_feature (6)..(6): n is a, c, g, or t
  misc_feature (9)..(10): n is a, c, g, or t
  misc_feature (12)..(14): n is a, c, g, or t
  misc_feature (21)..(27): n is a, c, g, or t
  misc_feature (605)..(605): n is a, c, g, or t
  misc_feature (622)..(622): n is a, c, g, or t
  misc_feature (730)..(730): n is a, c, g, or t
  misc_feature (748)..(748): n is a, c, g, or t
  misc_feature (813)..(813): n is a, c, g, or t
  misc_feature (815)..(815): n is a, c, g, or t
  misc_feature (818)..(818): n is a, c, g, or t
  nbla-10624-f
nnnngnagnngnnngtggggnnnnnnntttgattcctgtgcctgttggcctactgggaagaaaggacacaagataaacaataatttggataattcgtaaattggtatttcattcttgacttcttgagaattcattgtatacgctactcctcaaaaataaggaaaaccataaacaaaaattctggtctgaaatatcttggcagtaatgtgtttgctctcccctgtcctgaatattttaggctaactttcaattaaaatggattgcaattaaattattttgggcagaaatgtgtcttaacctttgacaaagttgatcatttcagcattttcaaatgcttaaactatttcttaaaatgacacaaattgtggcgttgccatttaccgaggtttacatgctcttgatgcttaaggattcggctttcttttttcccccgcatttattcactgaaaacatgattgattcagttttgtacctatgcagaatgccactgacgtgatgccagatatgccctatttagaaaaaataaaaattaaaaggatatttttctgcacagtcaaaattatgcagatgtggatttaaaagactacatgtcaaaaaatacacangtaaaggttacttactncatggttccttttacactcacagacagcagatttacaggcaccaaacagccttcatcaaaacaatgaaatgcccaatgtggctctttgatgacttcattctggctttnacgtatgcccaaaccctnataattgcaggtgctttttctgaccaattatttgggggctctggggtatttccaggcatgcctangncantctggtt

SEQ ID NO: 224 - DNA, 829 bp, Homo sapiens
  misc_feature (2)..(2): n is a, c, g, or t
  misc_feature (10)..(15): n is a, c, g, or t
  misc_feature (25)..(25): n is a, c, g, or t
  misc_feature (30)..(30): n is a, c, g, or t
  misc_feature (32)..(34): n is a, c, g, or t
  misc_feature (754)..(754): n is a, c, g, or t
  misc_feature (756)..(756): n is a, c, g, or t
  misc_feature (790)..(790): n is a, c, g, or t
  misc_feature (793)..(793): n is a, c, g, or t
  misc_feature (809)..(809): n is a, c, g, or t
  misc_feature (823)..(823): n is a, c, g, or t
  nbla-10624-r1
gngtgggggnnnnnntttggggccnttttntnnntttttcttgctaggaatgagtctacaaaatgcaggagagcaaaccaaatagacaaatgtaagggaatattgtctaaggggactaccagatctccaaaatgccactactttttgtatcctactattctcaacattctgtgtcagttacctgtgggctctaagattcacgtacagagaagaaaaaatggatgagcattaaagacaaaaaatgaagatgtcatagtagaaggagaaatagtaagttataaggaatagattagaaatagatttaccatgattaatctattatgctagcaaacttatatagagccatgcattagtagattgattagataaatcttatgaatctctttatttgaaaaccaaaagtattacattgccactcagttttggacctttactcacgagtatctgattcttgctcctggttctgaatgatacttctacttagaactgtgcctcagatgtcacacagctcccagataaatgagggtaatcaaagttcttgaacatcagtgtttctgatgttcaagatagtaggtgtaggacagtcaggaagggaacacagaccttcacaaggcttataagagtttctacatatgaactgcagagattgaggtgctttccccaaccacacgtgggttccttaaagacaaagacctaaaaaatgaggcactggcaaaatcataaacaggctctttcggaagatcagtttatcagngnacaaatacacttactggttaactatatctttcanggnattctttctctatttnaaatgggacttgantttaac

SEQ ID NO: 225 - DNA, 2547 bp, Homo sapiens
  nbla-10635
ttctaggcctgtacggaagtgttacttctgctctaaaagctgcggaattcctcgagcactgttggcctactgggaaaatgcattgactttgtagtctttattctcctagccgcacttcgggtatatccagaaggaagaggaaatgcaaagaggaagaagatgtaatagttcttctctccagctaggtgcacttgaggttgttcataaatgtaaaattatgtcaggtttctaacatgggacactgcacacagttgtctgacctgatgaaccatcccatttgaaagtatagattattattatttcttgtagtatttggttgttttccatctcattcatgaacaactcaacctgatagtagtatccaataaatgcctttcagggctcaggaatgaattgacatcctagttaagaaatgagacttaataatggagactgaggcggtttgtattaaattatatgccatgaagtgttcattttagctttaacctaattatgactgtaccaccatgaagtacagaatgaaaaattatatatatgggggggaaacagaatgaatatctgattcttttgaatgcttgtggaaatctttgagatcgtgcagggcataccacaaaatagcctttagaacagatacccaattttacagttcataggacaacatcaaacattagtaagtctaaataagatgaatagaatttttgttatgtaaattttgctagaacagtctattttcttgcacccctcaagttaacctcttaaaaaaatgaatgtataatttctaccgaaagaatatcagagagaatctctctggcctatagtgttaaaatattgttcacaaatcctgattagttaagtgcatacattatgaaacttacagaataaaacttattatacatctctttcttaaattaatatctttacacattttcaactggctccccaagtctgataaggaaggattaaaagaaaaaagaaatgtattagttgggtggccaaggagtttcctttgtaatgttgagagacttccgctttctgaatttcgctggttctctaaggtaaaagagttaaatagtacccttgttcaccaaggaaagtgatccaaactatatatctagtgcagatatttcctttgcattatttagtcttctctggagagaaaatacagtttccccttcctctttctcttcacatttactcttttcaacccaaaataagagacatagaaagcaaaccacagccagtttggcatcttctcagtgctactagtataggcacatacacatacacagtctcagcaaggttataaagaaccctgtcaggtccacttgcaacatggccttgctacttggattagctcctttaagcctgaaaataactttcctggtcatggaagaactggacgcatcttttaacttatgaaatagaagttgaacttgaaaactctttttaaaaaatcctggttttgcaggacagctacataatgaatgtatatattaagactgtagctgaattgcacatgaaatcagattgccaacttcttgactttcaatgttagacatttatccttaagttgtgagcgatatatgtagcatgctgtgaaatgtctgttatagctctttaattcatcagtattaatacagaattatcatttgcgtttcttggtactttttattcaatgtaatcagaagctgtgatgttttgcctttgtagtcctgtgctttgttactgtaattttttttttttttttttacgaagcacgtgactggactaatgtaaggcagatgacgtgatctttaagactgctatatatatcagtctcttactctataaggttttaaattagaataagcttttatcaaatagataattgatgcaatttaggattcacgcaagtttcagtgtcaaatggcggtcttatagtttcaattctgaaaatagcaaacttaataaacagccactttaaacttgttctggcaaaccagaccctgctgtagatatagtctaaggtagttaaccatataagccttttcaactcttaatgccctccacatgaatcagcagttaagaaggttctagaacccatgaaagcttttgtatgtattactaggttttgtttttcttatgtttgctgattttacagttctgactaaagctgacctaaatggatcagtttatgtgtaatattctagtgctttaatgactctttttttctttggagggagggtaacattatttggacagatgcagaaggaactgttagtgagtcaagacaaacacatctgaaataaaggaactgtgtattaacatgttaacaattcataactgcactttttatgacattttgaaaatctatttataggtacagaacaatgggttttgttaaactgtatcacatttatacttgcagaaatttatttcattgttattagtaggaattttattggttcaataaaattggcaaaactgaacaccaaaaaaaaaaaaaaaaaaaaaaaaaaaaaaaaaaaaaaaaaaaaaaaaaaaaggccacatgtgctcgagctgcag

SEQ ID NO: 226 - DNA, 823 bp, Homo sapiens
  misc_feature (7)..(7): n is a, c, g, or t
  misc_feature (9)..(11): n is a, c, g, or t
  misc_feature (16)..(16): n is a, c, g, or t
  misc_feature (23)..(23): n is a, c, g, or t
  misc_feature (26)..(28): n is a, c, g, or t
  misc_feature (33)..(35): n is a, c, g, or t
  misc_feature (288)..(288): n is a, c, g, or t
  misc_feature (309)..(309): n is a, c, g, or t
  misc_feature (422)..(422): n is a, c, g, or t
  misc_feature (509)..(509): n is a, c, g, or t
  misc_feature (512)..(512): n is a, c, g, or t
  misc_feature (555)..(555): n is a, c, g, or t
  misc_feature (586)..(586): n is a, c, g, or t
  misc_feature (607)..(607): n is a, c, g, or t
  misc_feature (658)..(658): n is a, c, g, or t
  misc_feature (672)..(672): n is a, c, g, or t
  misc_feature (675)..(675): n is a, c, g, or t
  misc_feature (696)..(696): n is a, c, g, or t
  misc_feature (703)..(703): n is a, c, g, or t
  misc_feature (715)..(715): n is a, c, g, or t
  misc_feature (742)..(742): n is a, c, g, or t
  misc_feature (748)..(748): n is a, c, g, or t
  misc_feature (765)..(765): n is a, c, g, or t
  misc_feature (776)..(776): n is a, c, g, or t
  misc_feature (790)..(790): n is a, c, g, or t
  misc_feature (794)..(794): n is a, c, g, or t
  misc_feature (804)..(804): n is a, c, g, or t
  misc_feature (806)..(806): n is a, c, g, or t
  misc_feature (809)..(809): n is a, c, g, or t
  misc_feature (811)..(811): n is a, c, g, or t
  misc_feature (822)..(822): n is a, c, g, or t
  nbla-10667-r1
ggggggntnnnttganccctttngannnccttnnntttttttttttttagttacatagcatctaagttttctgatcactaccaggtaattttcaaccaataagaaaaaggaaccaacactcagctctgtagaaatctaccttcttttagaaacctcaggcctctgcacccctttagacaactcatttacaaccacaaccttccatggcttctcacatgccagccagggcagggtaaaaacggcaatttcttacaccgaaaggtcctttttatgtaacaaacagacctncccaaaccacaacttttttgncctattgatgactcgcatgagatcaaatctctagtgtcccctgactgccccgacagggtctaggacaacacaggttaaaaaggacagcagggtccgttcaactcccacactgnctcaggtgttttctcaaagcacgacaattctgcaatggagacttacacgtggaaaagaatcaaactgtgcaggtaccctcagtcctntgncactaccagctcaatagcttgagctcagaggatcaagtcaagnctctgctcacttttaatctagcacacaagangccaactcagcagtacacggnattgaagcatgcacaggcattggtacaaaactcagttagattaagagtccntaaataaaccttgnagntgagtagaaatcccaaacagntggtgangacaggctgtangctaactttacattcaaggttttatcncccagnaggcagattccaaatgntagatattggnccggaaaattttcngggnaaagaaatcntnttncnctttatggccng

SEQ ID NO: 227 - DNA, 838 bp, Homo sapiens
  misc_feature (2)..(2): n is a, c, g, or t
  misc_feature (4)..(4): n is a, c, g, or t
  misc_feature (9)..(9): n is a, c, g, or t
  misc_feature (11)..(12): n is a, c, g, or t
  misc_feature (15)..(17): n is a, c, g, or t
  misc_feature (25)..(25): n is a, c, g, or t
  misc_feature (29)..(29): n is a, c, g, or t
  misc_feature (33)..(33): n is a, c, g, or t
  misc_feature (40)..(40): n is a, c, g, or t
  misc_feature (621)..(621): n is a, c, g, or t
  misc_feature (681)..(681): n is a, c, g, or t
  misc_feature (683)..(683): n is a, c, g, or t
  misc_feature (717)..(717): n is a, c, g, or t
  misc_feature (726)..(726): n is a, c, g, or t
  misc_feature (750)..(750): n is a, c, g, or t
  misc_feature (753)..(753): n is a, c, g, or t
  misc_feature (779)..(779): n is a, c, g, or t
  misc_feature (782)..(782): n is a, c, g, or t
  misc_feature (790)..(791): n is a, c, g, or t
  misc_feature (799)..(799): n is a, c, g, or t
  misc_feature (826)..(826): n is a, c, g, or t
  misc_feature (834)..(834): n is a, c, g, or t
  nbla-10672-f
gngngggtngnnttnnnatttgaantccntttnctgttgncctactggttcaaaaccttcaagtgatatgtggaaaaaagtgaatgagacctctgatagggggttttcagaaccttgttcacaccaaaatgtgacagttctttcatgttttcctaaaccaagttaaaattacatgtatattttggtgttaaggttgatttttaagatacttctgatttgtacaaaaggaatgtttcctttataaatcacagaagaaaatgacaatatctgttggatatttgatataatttaatggtgttataaaacctttaagaggattcatggtgaatatatgtgataacatctttatactttgaaaaatgttccacttacccttcagatatttgttgtaagttaattcaattcttaatactttaattttgctccaacaagggctttatgttgctggtaagagaatttatttactaaatgcactatgtataaagtgaaagatagtttacttatctgactttgatattagatggctgacattagtgcacataatgcagagtttaaccttgattcttcaacagagtccagatttaaatgtctacttagttaattagttagctgatattcttncacaattaatatattcaatttcccatcagtatatcactttaaattttatggttttctaangnaacttttcacagaattttaaacaactgatgcatncatactcanggtgtagggaagaatactttgcanttnaaaaccctgtcaacctgcaaccagcncangagaattnnaacttcantgagaatttagaaaaattttctaaagngagatgcntttt

SEQ ID NO: 228 - DNA, 882 bp, Homo sapiens
  misc_feature (6)..(7): n is a, c, g, or t
  misc_feature (10)..(10): n is a, c, g, or t
  misc_feature (19)..(20): n is a, c, g, or t
  misc_feature (22)..(22): n is a, c, g, or t
  misc_feature (32)..(32): n is a, c, g, or t
  misc_feature (40)..(40): n is a, c, g, or t
  misc_feature (42)..(43): n is a, c, g, or t
  misc_feature (57)..(57): n is a, c, g, or t
  misc_feature (61)..(62): n is a, c, g, or t
  misc_feature (66)..(67): n is a, c, g, or t
  misc_feature (70)..(72): n is a, c, g, or t
  misc_feature (78)..(79): n is a, c, g, or t
  misc_feature (84)..(85): n is a, c, g, or t
  misc_feature (93)..(93): n is a, c, g, or t
  misc_feature (99)..(99): n is a, c, g, or t
  misc_feature (108)..(111): n is a, c, g, or t
  misc_feature (113)..(113): n is a, c, g, or t
  misc_feature (116)..(116): n is a, c, g, or t
  misc_feature (119)..(120): n is a, c, g, or t
  misc_feature (123)..(123): n is a, c, g, or t
  misc_feature (127)..(128): n is a, c, g, or t
  misc_feature (142)..(142): n is a, c, g, or t
  misc_feature (155)..(156): n is a, c, g, or t
  misc_feature (164)..(164): n is a, c, g, or t
  misc_feature (167)..(167): n is a, c, g, or t
  misc_feature (169)..(169): n is a, c, g, or t
  misc_feature (175)..(175): n is a, c, g, or t
  misc_feature (178)..(179): n is a, c, g, or t
  misc_feature (187)..(187): n is a, c, g, or t
  misc_feature (189)..(190): n is a, c, g, or t
  misc_feature (192)..(192): n is a, c, g, or t
  misc_feature (194)..(194): n is a, c, g, or t
  misc_feature (196)..(196): n is a, c, g, or t
  misc_feature (198)..(199): n is a, c, g, or t
  misc_feature (202)..(203): n is a, c, g, or t
  misc_feature (213)..(213): n is a, c, g, or t
  misc_feature (222)..(223): n is a, c, g, or t
  misc_feature (226)..(229): n is a, c, g, or t
  misc_feature (231)..(231): n is a, c, g, or t
  misc_feature (233)..(233): n is a, c, g, or t
  misc_feature (235)..(237): n is a, c, g, or t
  misc_feature (239)..(239): n is a, c, g, or t
  misc_feature (241)..(242): n is a, c, g, or t
  misc_feature (248)..(248): n is a, c, g, or t
  misc_feature (250)..(250): n is a, c, g, or t
  misc_feature (254)..(254): n is a, c, g, or t
  misc_feature (257)..(257): n is a, c, g, or t
  misc_feature (262)..(262): n is a, c, g, or t
  misc_feature (264)..(264): n is a, c, g, or t
  misc_feature (268)..(268): n is a, c, g, or t
  misc_feature (275)..(275): n is a, c, g, or t
  misc_feature (277)..(278): n is a, c, g, or t
  misc_feature (286)..(286): n is a, c, g, or t
  misc_feature (288)..(289): n is a, c, g, or t
  misc_feature (291)..(292): n is a, c, g, or t
  misc_feature (294)..(294): n is a, c, g, or t
  misc_feature (298)..(298): n is a, c, g, or t
  misc_feature (301)..(301): n is a, c, g, or t
  misc_feature (303)..(303): n is a, c, g, or t
  misc_feature (306)..(306): n is a, c, g, or t
  misc_feature (309)..(309): n is a, c, g, or t
  misc_feature (313)..(313): n is a, c, g, or t
  misc_feature (315)..(315): n is a, c, g, or t
  misc_feature (319)..(324): n is a, c, g, or t
  misc_feature (332)..(333): n is a, c, g, or t
  misc_feature (338)..(338): n is a, c, g, or t
  misc_feature (343)..(345): n is a, c, g, or t
  misc_feature (348)..(349): n is a, c, g, or t
  misc_feature (352)..(352): n is a, c, g, or t
  misc_feature (359)..(359): n is a, c, g, or t
  misc_feature (363)..(363): n is a, c, g, or t
  misc_feature (370)..(370): n is a, c, g, or t
  misc_feature (375)..(375): n is a, c, g, or t
  misc_feature (381)..(381): n is a, c, g, or t
  misc_feature (384)..(384): n is a, c, g, or t
  misc_feature (387)..(387): n is a, c, g, or t
  misc_feature (389)..(389): n is a, c, g, or t
  misc_feature (394)..(395): n is a, c, g, or t
  misc_feature (404)..(405): n is a, c, g, or t
  misc_feature (408)..(409): n is a, c, g, or t
  misc_feature (411)..(413): n is a, c, g, or t
  misc_feature (415)..(419): n is a, c, g, or t
  misc_feature (423)..(423): n is a, c, g, or t
  misc_feature (428)..(429): n is a, c, g, or t
  misc_feature (431)..(432): n is a, c, g, or t
  misc_feature (434)..(434): n is a, c, g, or t
  misc_feature (437)..(438): n is a, c, g, or t
  misc_feature (440)..(440): n is a, c, g, or t
  misc_feature (457)..(457): n is a, c, g, or t
  misc_feature (461)..(461): n is a, c, g, or t
  misc_feature (466)..(467): n is a, c, g, or t
  misc_feature (472)..(472): n is a, c, g, or t
  misc_feature (477)..(477): n is a, c, g, or t
  misc_feature (479)..(479): n is a, c, g, or t
  misc_feature (482)..(482): n is a, c, g, or t
  misc_feature (486)..(486): n is a, c, g, or t
  misc_feature (494)..(496): n is a, c, g, or t
  misc_feature (498)..(498): n is a, c, g, or t
  misc_feature (501)..(501): n is a, c, g, or t
  misc_feature (503)..(504): n is a, c, g, or t
  misc_feature (506)..(506): n is a, c, g, or t
  misc_feature (508)..(508): n is a, c, g, or t
  misc_feature (516)..(516): n is a, c, g, or t
  misc_feature (521)..(522): n is a, c, g, or t
  misc_feature (525)..(525): n is a, c, g, or t
  misc_feature (528)..(529): n is a, c, g, or t
  misc_feature (531)..(532): n is a, c, g, or t
  misc_feature (540)..(541): n is a, c, g, or t
  misc_feature (545)..(547): n is a, c, g, or t
  misc_feature (549)..(551): n is a, c, g, or t
  misc_feature (553)..(554): n is a, c, g, or t
  misc_feature (557)..(557): n is a, c, g, or t
  misc_feature (562)..(563): n is a, c, g, or t
  misc_feature (567)..(567): n is a, c, g, or t
  misc_feature (569)..(569): n is a, c, g, or t
  misc_feature (571)..(571): n is a, c, g, or t
  misc_feature (574)..(575): n is a, c, g, or t
  misc_feature (578)..(578): n is a, c, g, or t
  misc_feature (580)..(580): n is a, c, g, or t
  misc_feature (584)..(585): n is a, c, g, or t
  misc_feature (587)..(587): n is a, c, g, or t
  misc_feature (589)..(589): n is a, c, g, or t
  misc_feature (592)..(592): n is a, c, g, or t
  misc_feature (594)..(594): n is a, c, g, or t
  misc_feature (596)..(596): n is a, c, g, or t
  misc_feature (599)..(599): n is a, c, g, or t
  misc_feature (604)..(604): n is a, c, g, or t
  misc_feature (606)..(606): n is a, c, g, or t
  misc_feature (608)..(608): n is a, c, g, or t
  misc_feature (611)..(611): n is a, c, g, or t
  misc_feature (614)..(614): n is a, c, g, or t
  misc_feature (616)..(616): n is a, c, g, or t
  misc_feature (618)..(618): n is a, c, g, or t
  misc_feature (621)..(622): n is a, c, g, or t
  misc_feature (625)..(625): n is a, c, g, or t
  misc_feature (629)..(629): n is a, c, g, or t
  misc_feature (632)..(632): n is a, c, g, or t
  misc_feature (634)..(634): n is a, c, g, or t
  misc_feature (636)..(636): n is a, c, g, or t
  misc_feature (639)..(640): n is a, c, g, or t
  misc_feature (644)..(644): n is a, c, g, or t
  misc_feature (646)..(647): n is a, c, g, or t
  misc_feature (649)..(650): n is a, c, g, or t
  misc_feature (654)..(654): n is a, c, g, or t
  misc_feature (657)..(659): n is a, c, g, or t
  misc_feature (670)..(670): n is a, c, g, or t
  misc_feature (679)..(680): n is a, c, g, or t
  misc_feature (684)..(685): n is a, c, g, or t
  misc_feature (688)..(689): n is a, c, g, or t
  misc_feature (692)..(692): n is a, c, g, or t
  misc_feature (694)..(694): n is a, c, g, or t
  misc_feature (696)..(701): n is a, c, g, or t
  misc_feature (703)..(703): n is a, c, g, or t
  misc_feature (710)..(710): n is a, c, g, or t
  misc_feature (714)..(715): n is a, c, g, or t
  misc_feature (717)..(717): n is a, c, g, or t
  misc_feature (724)..(726): n is a, c, g, or t
  misc_feature (728)..(728): n is a, c, g, or t
  misc_feature (731)..(731): n is a, c, g, or t
  misc_feature (733)..(735): n is a, c, g, or t
  misc_feature (742)..(742): n is a, c, g, or t
  misc_feature (744)..(744): n is a, c, g, or t
  misc_feature (746)..(746): n is a, c, g, or t
  misc_feature (748)..(748): n is a, c, g, or t
  misc_feature (754)..(754): n is a, c, g, or t
  misc_feature (759)..(759): n is a, c, g, or t
  misc_feature (761)..(763): n is a, c, g, or t
  misc_feature (783)..(784): n is a, c, g, or t
  misc_feature (786)..(788): n is a, c, g, or t
  misc_feature (791)..(793): n is a, c, g, or t
  misc_feature (799)..(799): n is a, c, g, or t
  misc_feature (801)..(802): n is a, c, g, or t
  misc_feature (804)..(804): n is a, c, g, or t
  misc_feature (806)..(806): n is a, c, g, or t
  misc_feature (809)..(809): n is a, c, g, or t
  misc_feature (811)..(812): n is a, c, g, or t
  misc_feature (817)..(817): n is a, c, g, or t
  misc_feature (819)..(819): n is a, c, g, or t
  misc_feature (833)..(834): n is a, c, g, or t
  misc_feature (843)..(843): n is a, c, g, or t
  misc_feature (851)..(851): n is a, c, g, or t
  misc_feature (853)..(853): n is a, c, g, or t
  misc_feature (859)..(860): n is a, c, g, or t
  misc_feature (862)..(862): n is a, c, g, or t
  misc_feature (868)..(868): n is a, c, g, or t
  misc_feature (872)..(872): n is a, c, g, or t
  misc_feature (874)..(874): n is a, c, g, or t
  misc_feature (879)..(880): n is a, c, g, or t
  nbla-10672-r1
ggccgnntgnatcaattgnnanccctttgaancacccaancnnatttcgccaaatcnccgnnttgnnacnnnatcacnntcccnnccactatncactanattttcaannnnancanctnnttntatnntcggggggcatttntaaacacctacanncccccccnctnanttcatngcnnatactacncnntnantncnncanncacattaccntctcatcanngannnncntnannntnanncccttnanatcncantaacntncccnattacancnnactactgncnnanntncaanccntnagnaantctntntccnnnnnnattacccnntaatngaacnnntcnnaancaatctnaatncttactnaacgncttacnctntanancctannctctcatanncannannncnnnnnactntcttnntnntnttnntnacatcatcctatactantccnatacnnctaancctcnanttntttnttctgcannncnaananntnanctattcancaaannctnccnntnntcacttanncacnnntnnntnnaanccttnnttanananacnnttnantatnncnantancnanccntctancncntcnatncnantannttnctcntanantnctnnctananntnnaaantannntcactcacctncctcacttnnaatnngannatntnannnnnntntaaacantacnntntataatnnntntantnnntcctccncntnanataatnctatntnnntatatacacccatttatctnncnnnctnnnccctcnanntntnacncnntctantnctactataatccannaatcttcanaactcatntncatctnntnacatancccntnccatnncg

SEQ ID NO: 229 - DNA, 2570 bp, Homo sapiens
  nbla-10677
gtacggaagtgttacttctgctctaaaagctgcggaattcctcgagcactgttggcctactggtacttctaaataaatgaattactcaatctcctatgaccatctatacatactccaccttcaaaaagtacatcaatattatatcattaaggaaatagtaaccttctcttctccaatatgcatgacatttttagacaatgcaattgtggcactggcacttatttcagtgaagaaaaactttgtggttctatggcattcatcatttgacaaatgcaagcatcttccttatcaatcagctcctattgaacttactagcactgactgtggaatccttaagggcccattacatttctgaagaagaaagctaagatgaaggacatgccactccgaattcatgtgctacttggcctagctatcactacactagtacaagccgtagataaaaaagtggattgtccacggttatgtacgtgtgaaatcaggccttggtttacacccagatccatttatatggaagcatctacagtggattgtaatgatttaggtcttttaactttcccagccagattgccagctaacacacagattcttctcctacagactaacaatattgcaaaaattgaatactccacagactttccagtaaaccttactggcctggatttatctcaaaacaatttatcttcagtcaccaatattaatgtaaagaagatgcctcagctcctttctgtgtacctagaggaaaacaaacttactgaactgcctgaaaaatgtctgtccgaactgagcaacttacaagaactctatattaatcacaacttgctttctacaatttcacctggagcctttattggcctacataatcttcttcgacttcatctcaattcaaatagattgcagatgatcaacagtaagtggtttgatgctcttccaaatctagagattctgatgattggggaaaatccaattatcagaatcaaagacatgaactttaagcctcttatcaatcttcgcagcctggttatagctggtataaacctcacagaaataccagataacgccttggttggactggaaaacttagaaagcatctctttttacgataacaggcttattaaagtaccccatgttgctcttcaaaaagttgtaaatctcaaatttttggatctaaataaaaatcctattaatagaatacgaaggggtgattttagcaatatgctacacttaaaagagttggggataaataatatgcctgagctgatttccatcgatagtcttgctgtggataacctgccagatttaagaaaaatagaagctactaacaaccctagattgtcttacattcaccccaatgcatttttcagactccccaagctggaatcactcatgctgaacagcaatgctctcagtgccctgtaccatggtaccattgagtctctgccaaacctcaaggaaatcagcatacacagtaaccccatcaggtgtgactgtgtcatccgttggatgaacatgaacaaaaccaacattcgattcatggagccagattcactgttttgcgtggacccacctgaattccaaggtcagaatgttcggcaagtgcatttcagggacatgatggaaatttgtctccctcttatagctcctgagagctttccttctaatctaaatgtagaagctgggagctatgtttcctttcactgtagagctactgcagaaccacagcctgaaatctactggataacaccttctggtcaaaaactcttgcctaataccctgacagacaagttctatgtccattctgagggaacactagatataaatggcgtaactcccaaagaagggggtttatatacttgtatagcaactaacctagttggcgctgacttgaagtctgttatgatcaaagtggatggatcttttccacaagataacaatggctctttgaatattaaaataagagatattcaggccaattcagttttggtgtcctggaaagcaagttctaaaattctcaaatctagtgttaaatggacagcctttgtcaagactgaaaattctcatgctgcgcaaagtgctcgaataccatctgatgtcaaggtatataatcttactcatctgaatccatcaactgagtataaaatttgtattgatattcccaccatctatcagaaaaacagaaaaaaatgtgtaaatgtcaccaccaaaggtttgcaccctgatcaaaaagagtatgaaaagaataataccacaacacttatggcctgtcttggaggccttctggggattattggtgtgatatgtcttatcagctgcctctctccagaaatgaactgtgatggtggacacagctatgtgaggaattacttacagaaaccaacctttgcattaggtgagctttatcctcctctgataaatctctgggaagcaggaaaagaaaaaagtacatcactgaaagtaaaagcaactgttataggtttaccaacaaatatgtcctaaaaaccaccaaggaaacctactccaaaaatgaacaaaaaaaaaaaaaaaaaaggccacatgtgctcgagctgcag

SEQ ID NO: 230 - DNA, 1991 bp, Homo sapiens
  nbla-10679
acggaagtgttacttctgctctaaaagctgcggaattcctcgagcactgttggcctactggtaggaaaagtcatgtttttcttctcagaaaggttgatcacatgacatgtctactaagaattttcacctctgtacttgtatgtatattttattgttactcaatcttgtattttatttacaaattcaacactgtcaaccctgggaattctaaaataccaatgtatttttaggttgtagctaatgttgtattcactttcaattctcagttgtccacaccggtgatataagaggaacaaatcagaatcattaaatactttgtaatgccatcataaactcatatattcatcctcaaactcccttgtttaatgctaattggtggcctggaacttcactgagatgcaaaatcaagaactgaagcctagttgctagataacgaaaagctataaatgtttatgtatgtgaattttaaattagaataaccgtcttaaactcctacttgccatttctaaggcaaagcattcattttaatattgtactttgccttttcattcagttagtggagtaagtcatgaaacccttaggaagaaaaacaagttatgacttattcactaaaattgatgcaagacagttggttctagatgaccatggccatgtgttcatcatataaaaccttcagttctctctatggtgcttggctggagattgacatgtgaggatgtgccaatcatattaaatggacttggtctatgtgggtgatatgtggcctgaatgtaactgtgatagactgaaatttgttcttagctctcaaaatccactgaagaagtcaagtgaaggtgggtaaaatagggagattagtgacaactttgtgccaaattttttaaaaaatggaagcaggtagccaatattagaatgataatttaagggtgtggttgaattttagttagttgtcacatagttattgaacctcatatgctcagtgctgtgggaatcaaacatggaagaggtatggctcctgcccctaatgagaacaagggggaaaaatccagatataatctaaatgctaggttatgtcagggtataggaacacagagaatgggggacctgtaagaactggaagagtcagagagggctccattgaagaggtcaaacataattccggaaagaattaggtagtgaggagattgtgccaggaaaataagtgggaaaggccacagttatgtttcctttgaatggaagagagacaaagctatcagctatagatcattgttttcttaagacagccaaactggccctttgaaaccattcaaattaccccagtttagctccctaccttttagtctccgtgaggaagacaagctgttgcattatcatattcctctgtgctgagcagctcaagactcagccacaatatgcaaattgctttaatgccatattacggcagttgatttagacatttgccagtgcaccaaaccatgagagattgtccgacctaatgccacctggcagatgtgtacccagagatttttctgtagctccatgtttcccataaagggcattggaaatgcacagatgaagatcttcctttggaaccaggcacatttggccccttctcagtgactgcactgtggaactcttcttaagaaaatattgaaaacagcttaatgctttcatatagtgaccgacatttagttgaaaactactgctgcatagcaaatattgtgactcttcatgtgtccacaggagctcttgtgtgggtttaaagctatgaagtgtattcacattgtgaagttttaattatctttattgaaattaattgtgtaaaaatggtatgtgctctattaggtattcagtttgtatgtgaattctataaagaaagtggtttttgttctttgagtttgttttatttcttgaagattagcaataaatatctaagagactatattcctgaaaaaaaaaaaaaaaaaaaaaggccacatgtgctcgagctgcag

SEQ ID NO: 231 - DNA, 2473 bp, Homo sapiens
  nbla-10687
gtacggaagtgttacttctgctctaaaagctgcggaattcctcgagcactgttggcctactggagagcgagggcgggcgggtgtgctccgttcggcctgggaatccgattggttatcgattcccgcggaaatcaccccggtgcctctcgcgccccctggccggcctatggcgataacttcacggagacgggcgtggctggagttttgctttattgaagttgaacggttggggccaggctgcgaaggagactgagagcgcgacaaggccctggacagatgcccgcgcggggaaggaaggctggcttaggagggggcgtcagctatggtttagcagcttccagcgaccgaaacctacatcacagccgcagcacacaattccaggaaacctggtgctcaatattgggatctcaggaatcaggaccggcggctggggtgaaagcctagcggtcagagcttaggagtgaggcagaagctgttagagactcttcgcaagtgaccccggggctacatatggatgattcaagagggagtctcctcgccagaaagttcacatgtttcactccttctggccttcataccaacccattgttaaaactggaagtccctccacctggggtcactgactccactgttttcagataggatggggaccctgcactggagactgctctctagcccctgggcaggagaggcacagacactgctacgcacgcggagcagggatcaccagcgctttgactgactttgctcgtccaggaggctggggacatgcgtgcccatgctcagcccaccccctctgtagacacaattggtcgcccattctgtttataggaagtcttccatcctgcaccagcagctgtccctagacagggattgggagacatgcaagttgcttggcttcctattaccttgtgttgaaaacacaataggctttgggatcaggagttcattccagttattttaatgttatttactagcagtgtgccctcgtgcacattatcaaactcctctgactcttggaatcctcatttttcaataataactcacaaagctgtcaagcctaagggttctaacagctcgaacagcacctggaacagaagcaatagccgccactcagaggttacttcttccttctccgccttctctggatcacctccctacctcatcctcaatctaacgctggaaatattggatatggggtaggtcaccaaatgttgccagaagactcaaattatgccacccatatctcagctgggaagggcttaccgtggcctgactctcctcagggtccaagtccccatttatgatgtccaggcagaaacacttgtttctgacacatagtaggcgctggaaaatgttagtcaaatgaacgaggtctggtgtggagagaagagaaatcttgggagagtcatttaagggggtgcccagttgtcctcataaaaaacactatcatcatcagggtgaccaaagcagacatcataggcagggggtggagtcagaggctctaatgtggggactgccgccaagctctgcagatcaggagcagtggacacagcccgtggtccccgaagccgaaggttgattggagctcttccagggcttccttcctgggccatggacccctctgaggccattcgcctctgttccagtttggctctcctggacccctctggatggctaggttgttcctcctcaggtgctgggggtatcacaacagtgctgtaggggggtggttggtccaactcttgggggcggcactgggattctagtcccaccacggcctcttcatagactggcacttcaaaggcttcattgtccctgagggaagagaaataaggccattggtggcttccatgaaagaagccctttttcccttttttttgtctgctgtgggcaaaagatcctctgttggcctctgacccctcctcccgctgatgccaatgacaggaaaccagagactctctgcctcagagactacagggagagagggaggatgggcccaaggtgtattcctcttacgatgcccacccttaactcaccgtgcattgcctgagggccctgggctctcagtctgcattgattggagctgggaccgaagcccccattccagaaaccggaccaggagataggcaaacaagaagaagccacccaatgtgagaaagaaataagcaacgggggtgatgtccgtctttatgcccagcaaagccagccccagtaggaaggaggcgcagcacaggaggagaagcggcttctccagtctccccagtaagtgcattggcaccatggcccctccccaggctcctgcaaaaagacacacagctattgtgtctacactagcaattggtgtcatggctgtgtcagataccaaagtaaccatatgatgtttctttgtttggtttctaggttcttcaatctcaaataaatcatctgtaaaaaaaaaaaaaaaaaaaggccacatgtgctcgagctgcag

SEQ ID NO: 232 - DNA, 1945 bp, Homo sapiens
  nbla-10696
gcctgtacggaagtgttacttctgctctaaaagctgcggaattcctcgagcactgttggcctactgggacaatccccagagccccgcggcccggcctcggggcagccatggactcgcaggaattgaagactttgattaattactattgtcaagagagatatttccatcatgtattactggttgccagtgaaggaattaagaggtatggaagtgatccagtcttcaggttttatcatgcctatggcacattaatggaaggtaaaactcaagaagctcttcgagaatttgaggctattaaaaataaacaagatgtatcactttgttctctacttgcactgatatatgcccataaaatgagtcctaatccagatagagaagctattctggaatcagatgccagagtgaaggaacaacgtaaaggagctggagagaaagccttataccatgcaggcttatttttatggcacattggtcgccatgataaagcaagggaatatattgacagaatgatcaaaatatcagatggtagtaaacagggacacgttttgaaagcatggcttgatattacaagaggaaaagagccttacactaaaaaagcactgaagtattttgaagagggactccaagatgggaatgatacttttgctctgctgggtaaggcacaatgccttgagatgcgccagaattattcaggtgccctggagactatgaaccagataatcgtgaattttccgagcttccttcctgcttttgttaagaaaatgaaattacaactagccttgcagaattgggaccagacagttgagacagcacaaaggttgctgctccaagatagccaaaatgtggaagcactgagaatgcaggcactctactatgtgtgtagagagggggatatagagaaggcttccaccaagctggaaaacttgggaaatgcattggatgccatggaaccacagaatgctcaacttttctataacattacactcgccttcagcagaacttgtggacgtagtcaacttattcttcaaaaaattcaaacgttacttgagagagcttttagtttaaaccctcagcaatcagaatttgctacagaacttggataccaaatgattttacaaggaagagttaaagaggcactgaagtggtataagaccgccatgacacttgatgagactagtgtgtctgccctagttggatttatccaatgtcagttgatagaagggcaattacaggatgcagatcagcagctagaatttttaaatgaaatccagcaatccattggaaaatctgcggaattaatctatttacatgcagttcttgccatgaagaaaaataaacgacaagaagaagttattaatttgttaaatgatgtcctggacactcacttttcacaattagaaggtttgcctcttggcatacagtattttgaaaagctaaatcctgatttcttgttagaaattgttatggagtatctgagcttctgtccaatgcaggtaagtaattatgggacttactttcaaggatgcgtttacttgatgttttatgaaagaacttaaaagttttctttgatgcattagactatatcggcatcttaaaatggtagtatttgtacctatgttagttgaaatcgcttttaatcagactgtttttagtaatgactgctgtcaactactgaaagtattggtttgcaaatattcatttgtatttcataaaatcttaaaatcttcagtttaaagaaatattaaaaggcatctaattcagacacctaccttatatttgctaccagtctgtaacatcactgtcaatgtctatcccatgtctggacacactaaaatgaagttcttgtcatataactatgattgttagcctgtgtttcctgtgttaagtcaaactctgcttttggttaaaaaaaaaaaaaaaaaggccacatgtgctcgagctgcag

SEQ ID NO: 233 - DNA, 2489 bp, Homo sapiens
  nbla-10712
gcctgtacggaagtgttacttctgctctaaaagctgcggaattcctcgagcactgttggcctactggcagttagaataggtaaagcattaataatggtaggctatatatcataatcactatataaagaaacatcagaatttggaaaccccttaagcaaaaatatatcttagaaatcttaaggacacttaatggcaagcaaaaaagtttaaatttagttttttataaattacatatagcacaatttatgtgtacatgtagaatcttttagtttttagtgtttatgtaatatattagacaataataaacatttacatttatgtttacatttatatttaatttttcaaatttaatttaagtttctaaatgcttctgtggatttaaattttggaataatcttttcttccccattgatactggaatcttgggaagtttcttactcatatcacaatatgttttatttaaatggatgcagcttacattgcagagtttatataaataatcacataacaagccaattccttagtcattttctgtattaaaaaactcagagatctagagagcttttggattgaaatatttccttggtgattttggatgcaaacctgatttctgtgttcacaccatggccagagatgggactgttagcaccacctgcttctttaatgtcgtccatatgatcagcatcagcaccagaaactccaggtgtcccaaacttaaagtgaaagccatagagtcctttggtgactcccatgttctgtgctggttctagaacatgctggtaaatatcagagtttctatgcttatggctgataagtagacatttttaaaaatcataaaaactgtattttctatatagttcagctaagtttatgaaaaagatgcagactcagtatttggagcattgctatcgctccatgatgtgtttaaaaattatttttaaattgacaaaattttatatctacatatatatatatcttgtaacacatgatgtttgaaatgcttaattctagccaattaaaaatgctttacctcaatagttatttttattgtgagaaaggtcaacatggtcttggcactttaaaaaaaaaaacaatatattctcaataactgtattcactctgcactacaataggtctcttgaactaattcctcctagctaacaggcattgtttatcatttaacagataattctctaagcccccttctcctaaaacttcagcatctcttaaccttctttctagtctctacttttatgagatcaacttgtttagattccacgtgagtgagaccatgaggtattcatctttctgtgttctgctccattggtctatttatctgtttttaatgccagtattggactgtttcagttactgtagctttgcagtatatttgactgtcaagtagtgcagtgcttccagccttcagagtcttttactgtactatatgaatttttgttttttttttgtgaaaaattttattgatattttgatagacattatgttaaatatatacatcattttgtgtaacatagactttttagcaatattaatttggccaatttatgaataagggataacttttcatttatttatgtttaattttatacctcagttttctttagcttttaatgtagagatctttaacatttttgaataattttatttggaagtaaactttctgtaactattgcaggtgtcaattgttttctttatttctttttcagatagtttgttgttagtgtatagaaatgctactgacccttatatcttgattttgtatcctgcaactttagtgaatttattctaagtatttttaaagttttctatttataagactgtgatatctgcaaacagggacaattattttctttctttccaatttggttgtctttggttttgttttctaatttctctggcctggaaattcagtagcatgttaaataagagtgatgaagttagatatatttgccttactataactcttagaaaaaaggcttacaacttttgaaggtttagcatgatgtcagatgtccatttgtcatatatggcctttattggcttgaggtatgtatgttctatatgtaatttgttttgagattttgtcataaagtaatgttgaattttctaaaattctttttctgcattcacttaaaagttataattggttctgagatccttcatctttctcagaatctaggaggatgcatctgtacctagaggaggacacaaaggcatcatatgttacattctcgtgacatataatgtctactgcttataatgtctactgtgagtttctgactccccaaatgaaattgaggcccagaaactttcaactgctttgttcgttgaataatgccaagtgtctggaaatgtgactattcagattaaatgcttaatgtgtgtgtgttgactaaataaatctcaaccagaaccttctcagaaaaaaaaaaaaaaaaaaaaaaaaaaggccacatgtgctcgagctgcag

SEQ ID NO: 234 - DNA, 2385 bp, Homo sapiens
  nbla-10751
gcctgtacggaagtgttacttctgctctaaaagctgcggaattcctcgagcactgttggcctactggatttttggcctgtcaggtccatccggcgatgctgggtctggacgagctcgggaggagtggttgtggccattgcacacaggcggatctgaggttcggcgacgccgctggtcgcgacccgggacaggacaacgacaggaacaccgccgagcccgcgttccccccccgcccagagtcatggcggcagcagccgctctgagggcgcctgctcagagcagtgtgacctttgaagatgtggctgtaaacttttccctggaggaatggagtcttcttaatgaggctcagagatgcctgtaccgtgacgtgatgctggagaccttgacacttatatcctccctgggttgttggcatggaggggaagatgaggcagcaccttctaagcagagcacgtgtatacatatatacaaagaccagggaggtcatagtggagaaaggccttatgagtgtggggaatataggaaattatttaagaacaagtcctgcctcactgaacccagaagagatcacaaacacaggaatgttcgcactggagaaaggccttatgagtgcagcaaatatgggaaattatttcaccaaaagcctacactccatattcatgagagatttcatactgggcaaaagacctatgagtgcagtgagtgtggaaaatcatttcaccaaagctcttcactcttgcagcgtcagacacttcacactagagaaaggccttatgagtgtattgaatgtgggaaagcctttgctgaaaagtccagtctcattaaccacaggaaagttcactctggagcaaagcgttatgaatgcaatgaatgtgggaagtcctttgcttatacatctagtctcattaaacacaggaggattcacactggagagaggccttatgagtgcagtgaatgtgggagatcctttgctgaaaactccagtcttattaaacacttgagagttcacacaggagaaaggccttatgaatgcgttgagtgtggaaaatcatttcgccgaagctcttcactcttgcagcatcagagagttcacactagagaaaggccttatgaatgtagtgaatgtgggaaatcctttagcttaaggtccaacctcattcaccatcagcgagttcatactggagaaaggcatgagtgcgggcagtgtgggaaatcctttagccgaaaatctagccttattatacatctgagagttcacactggagaaaggccttatgagtgcagtgactgtgggaaatcctttgctgaaaactccagccttattaaacacttgagagttcacactggagaaaggccatatgaatgcattgattgtggaaaatcatttcgccacagttcttcgttccgtcgccatcagagagttcatactggaatgaggccttataagtgaagcaaattttggaaattctcttgcccaggctttttgctccttcaaggccagagagttcacaccggatcaaggtgttatgagtgtgacaaatggggaatattctttagctagaatgctagcttctttacataaaagagtgctcccactgaagaagtgccttttgagtgcaatgaatgtgagaaagccttcagccctctctcattggttaccacaatatttacatgaggaaaataccacagatgtggaggtaatattattttttcttcaatataacactggaggaaaccccttatgaggatgccatctgcctaaattgaatgtcatacatcaaatagctgcatacattccaggtatgtgggaactgcatagtatttttcgacctgcccaggtctcttgctagacttctgtgacttacagttctcttctaaaaagcatttcacctttaccacttggcaggtgcccacagtacatcattcgcctaactcatcatgatccagaagtaactttgattttgtttcattcaacagagggattttttagtatcctcagcactcattctattctcatttctttctctccaatgagttaggccatgaacctgactcatttttggcacagaggactcttctgataacttgaaaaaatggactacctttttcagggatcttttggatctcacagagttcttaagatggaattttccagcctgccagtcatgaatctcagacagcctgccacctattgccctgatttgtgttataataaaggccttgttgcttaaaaaaaaaaaaaaaaaaaaaaaaaaaaaaaaaaaaaaaaaaaaaaaaaaaaaaaaaaaaaaaaaaaaaaaaaaaaaaaaaaaaaaaaaaaaaaaaaaaaaaaaaaaaaaaaaaaaaaaaaggccacatgtgctcgagctgcagtcgcggccgtag

SEQ ID NO: 235 - DNA, 758 bp, Homo sapiens
  misc_feature (2)..(10): n is a, c, g, or t
  misc_feature (12)..(22): n is a, c, g, or t
  misc_feature (29)..(29): n is a, c, g, or t
  misc_feature (646)..(646): n is a, c, g, or t
  misc_feature (702)..(702): n is a, c, g, or t
  misc_feature (719)..(719): n is a, c, g, or t
  nbla-10759-f
gnnnnnnnnntnnnnnnnnnnntttggantccttgagcactgttggcctactggtttatgaaataagtttgcattgcacatccgtgcagaaatctttctgactttgaaatttttagggcgtcagctgtcagatacgaaaggtagatatcaggtaagaatctggacttaggaaatagtcacaaaactgtcataggttgtaattttatcaacattcgcttctagtaaaattaaagtcaattaagaaatagaacttgggtcaaagttctgttacaaagcttcataatttgtcccgaagcatatggtggagcattctgagaaatttgctttttgtgtgtttgacattcctaatttgggagtccttcagctgaattactattcttttagaagttgagacagcaggtaagcaaaggacctagttcatgtaaacatggacatcatgatggctatttaaaaaatatttgttctacaccttctcccctgaggcttggggagtgtgttcagccgctgcagtttctctgctcatggaggtcttgtttggatctgtgctggcggctgagcatttagtgtgagccagtgacccatgaacttgccgctctgtgagggccagagtcagggccagtcatggtaatgggcctgaaggcacttncagaaccttttatgtctctcgtgagccatctgttaagaacgtcttcttggtgtggnttgtagcctacctggcngctattctgggaaaccttcttgagtgctatgcaaaagtg

SEQ ID NO: 236 - DNA, 767 bp, Homo sapiens
  misc_feature (2)..(3): n is a, c, g, or t
  misc_feature (5)..(9): n is a, c, g, or t
  misc_feature (12)..(12): n is a, c, g, or t
  misc_feature (14)..(20): n is a, c, g, or t
  misc_feature (42)..(42): n is a, c, g, or t
  misc_feature (597)..(597): n is a, c, g, or t
  misc_feature (669)..(669): n is a, c, g, or t
  misc_feature (686)..(686): n is a, c, g, or t
  misc_feature (707)..(707): n is a, c, g, or t
  misc_feature (727)..(727): n is a, c, g, or t
  misc_feature (740)..(740): n is a, c, g, or t
  misc_feature (747)..(747): n is a, c, g, or t
  misc_feature (755)..(755): n is a, c, g, or t
  nbla-10759-r1
gnngnnnnnggngnnnnnnnttgtgtggcctttttttttttnctttttttttttttgcaacacaagtcaatctttattgaaaactgcagtattaatacataacaattcttgttacaataaacgtgcttttgagatttttaaatctgagctcatctcatcagattgcataaaaaattaaaatagtatcaattgacacctaactgaactggctcaggatggaaattccattccttggcatggatacgtaagttcaatgcagaggtgagggatgcctttaacactggaagacaatgctgacttagcttaaaaaaagtaccgagagaacggtgtaaaaaacggtatttaaaaatcatttttaaaaaaacaaaaaggaaccgtttcttctttagttacaatccatgaggctctctagggcctctccgtgtggccagcacagcaaccctgctaggagcacaaacggctggcctgagatctggcccagctgccttgcccactggtctgcacagggactcatgggcacagcctgtggtgaggaggagacacctgtcatgccagtcctgggagcacaccacccttctgcaggcccgggggggggtncctacacagacgccggtcatctctgcttccctttccaagtgacttcacttcagtcctgtggaccaagataangctattcccacaggctnttcttcttcaaataatgagtnggaaaaagagacaaactttntgaaacatgcaantttcganccaaattnggccacatcccc

SEQ ID NO: 237 - DNA, 785 bp, Homo sapiens
  misc_feature (2)..(7): n is a, c, g, or t
  misc_feature (11)..(14): n is a, c, g, or t
  misc_feature (16)..(21): n is a, c, g, or t
  misc_feature (25)..(25): n is a, c, g, or t
  misc_feature (27)..(27): n is a, c, g, or t
  misc_feature (695)..(695): n is a, c, g, or t
  misc_feature (737)..(737): n is a, c, g, or t
  misc_feature (743)..(743): n is a, c, g, or t
  misc_feature (754)..(754): n is a, c, g, or t
  misc_feature (762)..(762): n is a, c, g, or t
  nbla-10773-f
gnnnnnnttgnnnncnnnnnnttgnantcctcgagcactgttggcctactggcagaatagacatttgataatggtctttaaattaccctgtacttttaggggggttatatgtcataggcacagacatctgactctctaatgtcattatgatacactttttttatatatatattttctttctaaatcataaaatgagtttacagcagcagaccccagcttttctgagaagtacctacactgttatattgtgtaatcgctgtaccaactaatatttttcgtcagaatatgtacaatacagagttgaagaatctgtatcaaaatgatcagctgtgatgagtctgagctagagggctttttcacaaagcatgttttgttctctggtgaacttatattagaccatggctgccaacttaaaattcctttcttttaaggatgcaatgttgcataattagtctgctattgcagtcaggatgcttgcaccctttattttactcctggtatagaatgcaatagactatcagagttgaaaggaacctctgagaccatctaattcaacttgctcgtaatatagatgagaaaacagcctctgtcagttttaatgtcgcacagcaaggtagctgccattaagaatctcagaaataagtttcattttagaaaatctcaagtattttctggataacaaatagaaatagatnaaaaaaagtagcttaaaacaatactattttttctaatgatcntttcantgacagaacangcctttgnttcacgtgggaccaattgggggt

SEQ ID NO: 238 - DNA, 797 bp, Homo sapiens
  misc_feature (2)..(3): n is a, c, g, or t
  misc_feature (5)..(6): n is a, c, g, or t
  misc_feature (9)..(14): n is a, c, g, or t
  misc_feature (17)..(17): n is a, c, g, or t
  misc_feature (37)..(37): n is a, c, g, or t
  misc_feature (668)..(668): n is a, c, g, or t
  misc_feature (694)..(694): n is a, c, g, or t
  misc_feature (703)..(703): n is a, c, g, or t
  misc_feature (715)..(715): n is a, c, g, or t
  misc_feature (717)..(717): n is a, c, g, or t
  misc_feature (731)..(731): n is a, c, g, or t
  misc_feature (734)..(734): n is a, c, g, or t
  misc_feature (742)..(742): n is a, c, g, or t
  misc_feature (751)..(751): n is a, c, g, or t
  misc_feature (773)..(773): n is a, c, g, or t
  misc_feature (793)..(793): n is a, c, g, or t
  misc_feature (796)..(797): n is a, c, g, or t
  nbla-10773-r1
gnngnnggnnnnnnttngtggccttttttttttttcnttttctaagaagaaagggataggaatcatgaagtcatttccagcaaatgtccttaataggcaagcttgccaaaatatcaccgtgcccctgtctttcccaaaaccttccaacagctatcagcaacagctgacaagcactagctaatttgaaattgtatgttctctcctgtcaacaccagaccacacacacagctttgaaaaacacccagtgaataccataatttttaaacagagggctcatcatgttccattttcttgtgcctaaaaagtaatatgtactttctattcagaatttaaaaaccttcaccaccctttgaagttttagatttaaaattttattctttggcatctgaaggaagaggacatcaaatattagaggcaataaagcaagtagaagtgacaacttcccctaaggttggtggtaccagacactggcgcaaattcatccatctgcatgtctcaaggcatattcccacatgaggatctaggagggaaagtgtcacggaacgaacagatgggcttccttgcctagactagcctaatggagcttttaggcaatttgcatactagctgcaagtgacacaggtgtgtgtcaagacttgagagaagctaaaagaaaccttatatagggnatactttcatgctgattcatgcttgncttcattgngaatgctaatangngatattttggttanaanggcaacanttcaatggngggccctttggttttttctttntaagtacaggcttgaggcanttnn

SEQ ID NO: 239 - DNA, 2438 bp, Homo sapiens
  nbla-10797
ttctaggcctgtacggaagtgttacttctgctctaaaagctgcggaattcctcgagcactgttggcctactggatgtatctttatgctctttcactgctcttctgtgcgttggagtttagcaattcagtgagactggggagtgtctcaagaatggaacctttgccttcaaggttgggtcatcaaaaatccctctaaaggatctaactgtaatgaactgtttttatttttgccattagtgcaagtatcaactggcagcctcaaacagctttagactatgtctcaggtctctcatagttatacttagaactgctctttcttgaagctaaaagaggtttttggagtaaagatctgcttcatgtctgctagcatggtatctgctgttcaacctagtatagagcatgtgaaatgcaactgtcctttaatggaattcagccaaactccaaaaatactgagttgcttctagttatctaaagtagtacagaatcactatcccgatgaagaagtggggtttttcagaagattgtaaactcatttccatggcacagatacaaatcatcgtcaggacttgttagccagtccatgtctcattgataggatgtagcctgccatctgcatagatggtttaacatggtgctgtttttgaaaacttgctgtggaaataaatttgacagacgagtagttatttgtaaagctgtcctagaaagaggttaattcttttggtatatgaatatttctcctccaatccttttaattaggtggttcagcttatcttgtattttctgagtcataactatactctagggccaagacctactataaaatctggggtcctaaccagagagttgtttagatcaatatgatatgctttgccaacatgatctaagaaggtattcattctttctgggtttgagaagagttgacgaaagtgtaagattatactctcatgctaaaataaggtataggctaagtgaaatactgtaaatgggttggttagaattaaagtttagaactctaaatcttatgcttatttttaaagtaaaaagttgcctcactgtcatgaaatcctgttactttcattaaaaaaaaaaatcctgtaaaatggtcaaattggataatgtaagagataatgatggctttgaggcatttcatactttaccagtttacatttggctagcagactggtaaggtttagggttctctccactaatggaaaattaaatgctaaacgtcctaagaattatgttgttttcaaggctttgactcagatttgtactttgatgtatgaaagtgaatatcaaacttgtttatagaaaagactatatagaaaaataagtctgtgttgtgtatagtgatacatgttttatgtttacccaatgcctgtactaaatcttgtgcttggctttgaattatatatgtgtttacctatgacttttttttgaaataaacagaacagtcatctaaaaacataaggttttggaaaggagatgctttttcaattcttaccatctgattaggtggaatgttttatagacttttggtgttgaaaaaaaaaagtttgataacaatgcattttgcttggaataccccccaatccagaaaagttggtgacttctctccattgtatatatgtacatagttttcattactagattgtaagctcctcaagggcaggaattgttttatctttgttgttcctgcagcacctaatgtaaagtgccttgcacagggtaggtgctcatgacgtgtagaatgagtgagtaacttcctgcctcatcaggatgaaatgtggttcacttcccctgtgttcaacactacaaagctactcctgccagaagagggcagagttctttcttgggtttgaactggcttttttgggttgaaccagatcatcccacatccttagcactacttaaccttcttttcctgaagattacatatcagtgtcctgcgtttttatctaatattagagctgaggttcctaggaaaattttgaagtggggaagattatggagaaaatgaaatggaaatttggggagggtggtttgtcagtataaggccctgtggggtaatcatattttagttattacttgttaaaagggtagcagaacctctgtttctttaccaagtcgctggttggccatttctccaattgatgaactaccattggttttagctctttctcatttgggattcccctcaattgcttacatgattctggtacttagagtctaatagagttgctgtgaatatgtagtgctgtacataatggcagttttgtaaatgtgagataaccttgaatatgttgtggtttgtatacagagccattagtattgttattttggccacttttttattcaaaataaataacataattatttgtaaaaaaaaaaaaaaaaaaggccacatgtgctcgagctgcaggtcgcggccgctagac

SEQ ID NO: 240 - DNA, 1739 bp, Homo sapiens
  nbla-10798
gcctgtacggaagtgttacttctgctctaaaagctgcggaattcctcgagcactgttggcctactggttagatgtttctcaggatcccctcctgcgcaggggttctctgattttcgtgttctctgcccagatgggctgggggagttgagagtgtgcttattttcactgcgatcatgagaccacagttctgggttatctcctctcatacatcaagccccagaggaggcggcaagaggaacagccacaaacaagtactttaccccacagcttagtggccagtaaacaccctggggactaggaaaaggaaccaactgtaggcacctctccagggcctagggagacaagtgtcctctcttctgcatacatttgggctccccttacagagccctttgccctggctctctggtccttgttgctctaacagtccagatgtacacccagcctcagggggaaggcagctctctccagacagagtctcagggcccagcaaggtcaggttatctgctttcattcagggcaacaaatgatacaaatggtgccagggagtggcaaggccatgggggtaggtgggggtgtctttttcttttcataaagtaacaacagacgagactgaggttaaacatcagaaaaaaacctctggaatgaccttcctcattccaggaggccctggaataaggaagaggcttctttctgagggagctttgaggaattttgacagctgttgacatgggatttgggaaaggtgaagctgtgactggaggggcaggagatggtccaagtgtccatccagagatgagactcttagaatcaaagtgttcagcccaggaagtcttggagatcccaccttctgtggccctgcaccttatgggaagccattaagggggctcatctaggaattctggttacagcccagtgctcatcccagcgtatgctgcctctttagggcagccccaagggccagccagcctgtactctgggcaagagcccaaaatggctaggaatgtttgactcccttaatctcttccccagctacagaggaatcttttctctgcctggtctcagaatgggactgccaactggctcattggtgggagacacagtatcctcaaacctgtggccactggcatgacagtggtgctctgtctccctgggtgacacccaccctaggcttcctcctggatgtgatggggattgccagagaggctcttagcataaaaggcattaggtgggcatttttctgtgtgcccccaaaaagctccatggaaacaggcacctggtagctgcggaacacccgtggacttgtgtatatggtcataggctttgggaagacaggacgtaaaggaaaatgagagaaacaaaatgggtcagatagctttggccacagccccaggcagcctttggggcctatgacacttagtgcccttagatgggatacatctcgcctcggccccaagactcctccaacttacccgtcccatccaaggcctgcacagcttagagaggctcacagcttggcaaatgctagggcttcatcagaccactgacttgactcagtgtttgttaaaatggaaccactcccgttagcctactgtttctctcctgtacttcttgtaatgatagttatttattgactctggtagcaggcagttcttaaataaagatggtttctcaacctgttggggaaaaaaaaaaaaaaaaaaaaaaaaaaaaaaaaaaggccacatgtgctcgagctgcag

SEQ ID NO: 241 - DNA, 794 bp, Homo sapiens
  misc_feature (1)..(3): n is a, c, g, or t
  misc_feature (5)..(25): n is a, c, g, or t
  misc_feature (39)..(39): n is a, c, g, or t
  misc_feature (175)..(175): n is a, c, g, or t
  misc_feature (490)..(490): n is a, c, g, or t
  misc_feature (560)..(560): n is a, c, g, or t
  misc_feature (607)..(607): n is a, c, g, or t
  misc_feature (670)..(670): n is a, c, g, or t
  misc_feature (678)..(678): n is a, c, g, or t
  misc_feature (687)..(687): n is a, c, g, or t
  misc_feature (698)..(698): n is a, c, g, or t
  misc_feature (742)..(742): n is a, c, g, or t
  misc_feature (744)..(744): n is a, c, g, or t
  misc_feature (750)..(750): n is a, c, g, or t
  misc_feature (755)..(755): n is a, c, g, or t
  misc_feature (758)..(758): n is a, c, g, or t
  misc_feature (785)..(785): n is a, c, g, or t
  nbla-10805-f
nnngnnnnnnnnnnnnnnnnnnnnntttggaattcctcnagcactgttggcctactggttaaatttggctctaaagttggtgtagcagcagttgatcagactgaaaaacggtttttagtctctggaaaaagactgattttgctttttttataaatattattagatttattaattnttctgtgctcaatgtgtaaattgtattataattcattgtgatttatttcacttttaatttgctggtgttttaataaatgggggtgttactgaatctttcttcccacttccatttcttttgaccaccccttaaccctcaactgtgacggtagtagtattatcatttgtaccaaagttttgcatagtccctgttgactttgtaatgttaacggagtcataaaagcactaggcaagagaaagatagaaatttgcttttaatctttttgccttttattttgcacattatgcaaaaggaaaaacattaaagaacactttnttttaagtgagtgaaaacatggtaaaagacatacaaggcttttatgcacattggtaagctaaatcaaggncattataatcatttcctttttattaagatttaagtaaccaaatttanaatttcagcatttcaaaatgatttatttttcaggcttaaatcatatttacacctaggttgagntaaagatntgaaatatntaaggatgatncagggtttcaaatatctaatacttttggaaataactctggtttngntttttnggggnggntttaccaaatttaaggttccaaactgnaaagttatc

SEQ ID NO: 242 - DNA, 803 bp, Homo sapiens
  misc_feature (1)..(4): n is a, c, g, or t
  misc_feature (6)..(7): n is a, c, g, or t
  misc_feature (10)..(15): n is a, c, g, or t
  misc_feature (37)..(37): n is a, c, g, or t
  misc_feature (474)..(474): n is a, c, g, or t
  misc_feature (490)..(490): n is a, c, g, or t
  misc_feature (625)..(625): n is a, c, g, or t
  misc_feature (629)..(629): n is a, c, g, or t
  misc_feature (642)..(642): n is a, c, g, or t
  misc_feature (670)..(670): n is a, c, g, or t
  misc_feature (681)..(681): n is a, c, g, or t
  misc_feature (689)..(689): n is a, c, g, or t
  misc_feature (703)..(703): n is a, c, g, or t
  misc_feature (708)..(708): n is a, c, g, or t
  misc_feature (743)..(743): n is a, c, g, or t
  misc_feature (754)..(754): n is a, c, g, or t
  misc_feature (768)..(768): n is a, c, g, or t
  misc_feature (774)..(774): n is a, c, g, or t
  misc_feature (786)..(787): n is a, c, g, or t
  misc_feature (789)..(789): n is a, c, g, or t
  misc_feature (803)..(803): n is a, c, g, or t
  nbla-10805-r1
nnnngnnggnnnnnntttgtggccttttttttttttntttaatttaaagatagaatttattctctgatggtttactcatgcaaactgcacataaaagaaaatagtacagtttgtgtaacattgcaaatataaggactgaaaatgctaggtacagaagtagtatgacatcctgaaagtcaaaatggaatttgtgtttatacaactaataatgatttttatttgctcagtacagactgatttacaatgaaagttttgctaaccttggtaagcttgttaaccgtttacatgacttcttacatctatgtagttttattttacagttgcaagaattctgttaccaaagaaccttaacttgcataagtaataagatgaaagaaaaatgtactgaaggacttaagagtgaaaaattgaggcttttcctaacccattcaaactacaataaaaaatagccttcttgcagaattcatattttgngcctttgagataactncttagaataatgatatcaaaatcatgatttgaaaaactgattactttaaaataatgaaattaggtaaaaattaaaaatttaaaaaaattatcaaataaaaatgctctcattttaaaaagccaaaccattaaattnccantatcttcatactnaagtctggaatggcatttatataattgnatggttcccantttggacntagcaggaggatanttccntggattatcaaggttttccatacgacctttaaaangcagctcattngaaatggccctggnactttnccaaaagggganntngatccggacaactn

SEQ ID NO: 243 - DNA, 789 bp, Homo sapiens
  misc_feature (1)..(1): n is a, c, g, or t
  misc_feature (506)..(506): n is a, c, g, or t
  misc_feature (613)..(613): n is a, c, g, or t
  misc_feature (618)..(618): n is a, c, g, or t
  misc_feature (641)..(641): n is a, c, g, or t
  misc_feature (677)..(677): n is a, c, g, or t
  misc_feature (683)..(683): n is a, c, g, or t
  misc_feature (697)..(698): n is a, c, g, or t
  misc_feature (700)..(700): n is a, c, g, or t
  misc_feature (723)..(723): n is a, c, g, or t
  misc_feature (744)..(744): n is a, c, g, or t
  misc_feature (746)..(746): n is a, c, g, or t
  misc_feature (755)..(755): n is a, c, g, or t
  misc_feature (758)..(759): n is a, c, g, or t
  misc_feature (763)..(763): n is a, c, g, or t
  misc_feature (766)..(766): n is a, c, g, or t
  misc_feature (769)..(769): n is a, c, g, or t
  misc_feature (771)..(772): n is a, c, g, or t
  misc_feature (781)..(782): n is a, c, g, or t
  misc_feature (789)..(789): n is a, c, g, or t
  nbla-10808-f
ntttgaattcctcgagcactgttggcctactggaaaaaacaataggacggaaacgccgaggaacccggctgaggcggcagcagagcatcctggccagaacaagccaaggagccaagacgagagggacacacggacaaacaacagacagaagacgtactggccgctggactccgctgcctcccccatctccccgccatctgcgcccggaggatgagcccagccttcagggccatggatgtggagccccgcgccaaaggcgtccttctggagccctttgtccaccaggtcggggggcactcatgcgtgctccgcttcaatgagacaaccctgtgcaagcccctggtcccaagggaacatcagttctacgagaccctccctgctgagatgcgcaaattcactccccagtacaaaggtgtggtatctgtgcgctttgaagaagatgaagacaggaacttgtgtctaatagcatatccattgaaaggggaccatggaattgtggacattgnagataattcaagactgtgaaccaaaaagtaagctcctaaggtggacaacaaacaaaaaacatcatgtcttagaacagaaaagaccctaaggactgggtgcgtaacanccgtnaaagaggagaaaatgaagaaccntaagttagaagaagaatttgagtggctaaagaaatntgaagnctggctacacttgnnanaaaaagggaatttaagttccaantttaacctttaacccttggancntgaatgtanccnnaacngtnccngnnaatgaaggnnaatgcan

SEQ ID NO: 244 - DNA, 804 bp, Homo sapiens
  misc_feature (2)..(3): n is a, c, g, or t
  misc_feature (6)..(11): n is a, c, g, or t
  misc_feature (34)..(34): n is a, c, g, or t
  misc_feature (553)..(553): n is a, c, g, or t
  misc_feature (565)..(565): n is a, c, g, or t
  misc_feature (599)..(599): n is a, c, g, or t
  misc_feature (626)..(626): n is a, c, g, or t
  misc_feature (724)..(724): n is a, c, g, or t
  misc_feature (736)..(736): n is a, c, g, or t
  misc_feature (741)..(741): n is a, c, g, or t
  misc_feature (756)..(756): n is a, c, g, or t
  misc_feature (799)..(799): n is a, c, g, or t
  nbla-10808-r1
gnnggnnnnnntttgtggccttttttttttttcnttttttacaataaacaaaaagatttgtattagaacatatacactcagggaagaaagaggtatcatcatcaaatgtggaatgttgaagaaatagttaaaataaataaagactccaagcacagctgggactggctcaggctggggctcacagaggccaccgcacatcagctccaggctgcaggagccaccacctggccatactggcttcctccctgacacagcacagctgtgcctgggacacagagtcgctctcaagtactggagcagctagcaagctcactccccactctcctcacttatctctgtgacaatgtctatcaggctctggagcccgaagatatagccagcatcctggccctcatgcaccacggtgtcctcgccatacagcctgcaggtggtgtgtgcaaagtcgatcatgcgcacatctacagagctggcgccgatgggtttgtaggcataggcaccagcagactcatcaagctgattcctctgacaggtcttcaaatctcacatctgagtncaggaccacttngggcccggtccttgccatcataaatgaccagcanggaacttgagtagaaacggtaggactnctggcgttcaacactggcttgactcagtcagcttcttgacacaagggccaagaattcacgggggcaagtcccgccattgggggaaaactgggaaaagngcctccttgaanccttnaccgatagctttcgnccggggacctggtcatgaacatgacttgccaatgctgcttggncacct

SEQ ID NO: 245 - DNA, 1916 bp, Homo sapiens
  nbla-10830
ttctaggcctgtacggaagtgttacttctgctctaaaagctgcggaattcctcgagcactgttggcctactggggtacaaagtcatgatgattccctgagtaacaaagggaaatgaaaactgtttgtgatcttccgtattcactgaaaaataaatgcttgtttagtatcaaattttatttcacgaaagtttttttaaagaacagaaacttttccaattaaaaaaaaaaagcagacttctggttcaagatagctcactggaatacatgtttacctctttctttcctaaattgcattgaattgataggaaggatggcggaatcttaaagtgatacatgctaactgtagaaaaaaatagaaaatgcacataagcaaaaggaaacatttaaatgctatctttcaaagataactactcttaaaaccttgagtatcttttcagacctttttcttggcaaatgaatccatattgacatatttgatttttttaaaaacatggaaacgtactgttttgtaaattctttttaactgcacatctactgttcataaatatacctctgtaacataactttttgtggttctaatgtactctgttgtatagctaatacaagttaggatgcttttggccagaggtaacagtgtccaaatataattggcctaagtaacctaggaaattgtttgacataacacagggttcaggggtgtcattaaagacacactttttttgccttgacctcagttggtttgttttgccttaggctattccacctctcgatcacaagagctgctgctataacttccagttttacatctttgtaaaattgtatctcaaaggcagaaaaggccatttcgtctctcatttgttttatccatgaggaagatttttaacaaaagcctccagaagatttcccctcagtttccattgacttagatcaggttacagagaaaggcaatgtctgacatttttggtctctgttagaagtagactctgttgaaaagaaagaagctaagctaggtgtgaagaatggaattggaagcccactgccttcccataagaaaggtttaccataatttactcacttttttctgtgttagacattttgattatctgcagtttattactacaagcagtggcagagtgaatgtccttgtacattttgagttacatgcttaattatgtccttgagaaagtttctaaaagtggaatgattggtttgactggttcatagggctttaattatacaatttacccctctaattagtactatatgtatgtgacttccctccccctgccagaatactccttggtcaattgtaggtattctttttggtttaatttttgccaatgtaattaaaaaatggtatgtcatttttaaaatttgtatttctttcattacaaataagattgttatgtcagtattgttattggcttttcgtattcctcttaacgtgaaccgtctgttcattgtttttacctgttttcgttttagcaagtagtacttaatttaaagtgtgaacttaatatataagatgccaggaccatcatattgatgacaaaaatctattatgtggttgtagtgcatgtcttggagttaaactcttaagtatcaagaagtaaaataatttcattgtttctgttactaacattaaaagtgtgcaaattgtataaaattaggtacttcgattagtaaaagaaaaaaatttgaatgtttttttttttattttattaagcatgcccagttatgccaagcatagtaaataaaggtcaagtagcatttataatagaggaagtattgttatccctagcatgagtgtaatggtgatatgaaaaactttgtcttgtcattataataataaaaaaatgaacatttattatggaaaaaaaaaaaaaaaaaaaaggccacatgtgctcgagctgcag

SEQ ID NO: 246 - DNA, 1858 bp, Homo sapiens
  nbla-10833
gcctgtacggaagtgttacttctgctctaaaagctgcggaattcctcgagcactgttggcctactgggttcaaaaaaaatgtatagaattatccatgcaagggattctggtataggaggtgtgggcggtgagcaaaaagagatagtggacgtagactacttgtttaaaaagcctgcagtgtatagaaggaaaaaaaaataagctgaccatcagttattggctgggagatgcccaggaaagacatgccttggctcacaccctggggcagattctgagggcactgctgctggaggctttcagctaactgtgcccatcacagctgagtgacaaaatgtcttgcagggagatctgagcggcacatgtccttggtataatttatgccactataaacaggacactaacactgaaccatttatgccactataaataggaagctaacactgaacctgatgaacgaatccatcaggaacaaaagacagacagacacgcacacacacacatgcacacgcacacatcagcatggctgtatttggccatctatcagtagtcaacggttaatcagactgtatattgggaacatacatggctttgttttcttacagacttaaatttgaagaacagtgatgatgaactcattctatatcactttggtttaaaagttgcttagcaatgggacaaaaacaaaagcaactaggtttatatttagtgctctatctatatgcatctggagcacatttcggaaataattcaaaaaggccaattcatttcatgccttctgctactaaatgaatgtgggagtcaagctgctattttcacagtgcaagacatttattgttgacttaaaaaaactctcccacttgcacataatcactatcctgacaaatgacactatagagtttcagctccttaagcataaggtagaacaatctttaagaaataaatattaggccacaggagttaaacataaagtatcatccaagcacagattcaaagcatttaaacacatacattattctcaagtggaccagttcttcactgagtatgtgttctttaggtttgcaagactaatcttatgtctcacccctcctcaattgaacagtattggcactttgattattcagtcagtgtaggactttttaactccgtgccaggctcatttgcagctatcagtgctgatacaacttcatgccatataatacttttaacagactacttccacacccctgcaaaaaaaaaaaaagttaataagcaactgatcaattaaggttaatggtagatttaggcctataaattgtacccatcttagtcatttctgcttcctaaaaatttatacaagaacagtttttttctggggtaagagggtgtgattgacaccctaattctgtttcttctgtttagattgtggaaatataatcggaccgtttcagggctctatgagtgtgatccttggacatgaaacagtttccgagtacagagtatgaagtgctggtgagcttttgtcaccaacagcacttaagaagtattttggccaggtgcagtggctcatgcctacaatcccagcactttaggagactgaagaggcaggatgattgcttgagctcaggagttcaagaccagcctgggcaacatagtgaggccccatctctactaaaaatttaaaaaaaaaaatcagccaggcgtgatgtcacatacctgtagtccctgctacttgggaggctaaggcaggaggatcacttgagcctggatgattgaggctgcagtgagctgtaattgtgctactgcactctgcctaggagacagaaggagaccctgtctcaaaaaaaaaaaaaaaaaaaggccacatgtgctcgagctgcag

SEQ ID NO: 247 - DNA, 1934 bp, Homo sapiens
  nbla-10857
ttctaggcctgtacggaagtgttacttctgctctaaaagctgcggaattcctcgagcactgttggcctactggagtgggtgtgagtgaatgggtgggtgaaagagtatacatgcgtagatggataggtggatgggtagatagatggatggatgaaagaatgaatgggtaggtgggtagatgggtgagtggaagagtaaatggatggatgacctcaaatggccccaagggaccactgggctctgccttgccctgtgtatttggtgtctatggtttcaggccagggctctaagtggcacgagatgctccccaaacctctcgctcttccactttccaccaccctttgctgttttgccaccttctgaaagataccaaagagaatgaaggttaaatctgacccttcctcctccctgccccaccctgggcccaacattcagagaagagttaagtgacagagcctcgttctcctgtatgaattaataattgattcagtaacaaatcactaatattgcagtagtcgtggtgaataagataatgaatgtgttctgtccagggagtgtcatgttgtgaggattcagctgaaattattcataaatgtgctacttttcctcatctccaactactgctagtttagctcctctttttaatcttcccaacctgtcacattcgatggtagaaatcgtcaggctccatatacagcagaatattaagggggaactgccaaggcattatgtcaaatttcaataggtaataaaaacaaagtgcttgaagaccattttccacttctcttaaagttaaaaaaagaagacttccaaaaacctttctagatgggcactttctcccatcattggggggaaaaaaacctgagttcaaggtattcagaaacttgggtatgatccccactttaccacaaagttgctgcgtgactttgagccagtactcaaccatcctgggctaagtctccaatctctaaacaaggggtgcctccctgcttttctcctgggtgtcatgatgtaattgtgaggtgatgggaaagaaagtgttctaggccactaatagatagctaggctggattttctccactatcacaccctacaccaaccaggtcagcaggttcactattctctaaacatgccttccatgtggccaccacagagagggcccctgccctcctgttcaccctccatgtctcttcccttctccatctgacccaaccagcactctgggctcagttcagccaccacttgcttcatgaaacctttcccgatcctgcctgacagacatattttctcctactccacatctccccagagcaccctggcccactcttacacatacctcttacactgctttccacataccatcttccctagtagactgcaagcatctcaagaatggaagttgtcttctacatctttgagtacaataagaaaggagaaatatttgtagaatgagtccactggtggatgagtggggagatggatagatagatgagtaggtgggtggatcggtggtggatgagtggatgggtagatggatgagtggatgggtagatggatgagtggatgaatgctggatggatggatgaattagggccgggctttgtggctcacacctgtaatcccagcactttgggaggccgaggtgggtggatcacgaggtcaggagattgagaccatcctggctaacacggtgaaaccccatctctactaaaaatgcaaaaaattagccgggcacggtggtggctgcctgtagtcccagctactcgggaggctgaggcaggagaatggcatgaacctgggaggcagagcttgcagccgagatcgcgccactgcactccagcctgggtgacagagcaagactccgtctcaaaaaaaaaaaaaaaaaagaaaagaaaaaaaaaaaaaaaaaaaggccacatgtgctcgagctgcag

SEQ ID NO: 248 - DNA, 779 bp, Homo sapiens
  misc_feature (2)..(2): n is a, c, g, or t
  misc_feature (4)..(10): n is a, c, g, or t
  misc_feature (14)..(17): n is a, c, g, or t
  misc_feature (19)..(20): n is a, c, g, or t
  misc_feature (27)..(27): n is a, c, g, or t
  misc_feature (673)..(673): n is a, c, g, or t
  misc_feature (688)..(688): n is a, c, g, or t
  misc_feature (733)..(733): n is a, c, g, or t
  misc_feature (737)..(737): n is a, c, g, or t
  misc_feature (740)..(740): n is a, c, g, or t
  misc_feature (746)..(746): n is a, c, g, or t
  misc_feature (748)..(748): n is a, c, g, or t
  nbla-10860-f
gngnnnnnnnttgnnnncnntttggantcctcgagcactgttggcctactgggtgcttttgtgcactttatctggggtaaagttgtaaatgttcagtttcttggtaaaggatattatgttttaagttttggtggccattgtccaattttctttaaagagctgccccaagttacagtcagattaacagtgtagagcaccagctttctcatgtccccagcagcactgagaggcggaagatagtgcctcactgatggtttatttcacacttcgttacttatggttgagagagaatatttttcagattttattggacattgatatttgtaaattgttcattccttttgcccagttttctattgagtggttcatagtttctcatgggtatccaagagttctggatatgtagaggtggagggtcaatctcatcacttccttgttttaaaaatcttccatggttttgtcatcactatgggctcaaacgccgtggtgtggcatacaaagccctcacttctgaaccaccctgcttccagcctcatctcccatgatccctgccacgcggtgccgtttgcgctttcatgtccaagtgcttccttcatgttggtttcttccttacaatgccctttccttattgccaacagagtgcttctacaccttgaggatcataagaacctgngtttccattttattntttatcataattttggggcctatcttcccaaagactttgattcantggncantgtgangnctgatctcattttctttatctgaacgatgac

SEQ ID NO: 249 - DNA, 788 bp, Homo sapiens
  misc_feature (2)..(3): n is a, c, g, or t
  misc_feature (5)..(6): n is a, c, g, or t
  misc_feature (8)..(14): n is a, c, g, or t
  misc_feature (17)..(17): n is a, c, g, or t
  misc_feature (37)..(37): n is a, c, g, or t
  misc_feature (617)..(617): n is a, c, g, or t
  misc_feature (664)..(664): n is a, c, g, or t
  misc_feature (669)..(669): n is a, c, g, or t
  misc_feature (779)..(779): n is a, c, g, or t
  misc_feature (784)..(784): n is a, c, g, or t
  misc_feature (788)..(788): n is a, c, g, or t
  nbla-10860-r1
gnngnngnnnnnnnttngtggcctttttttttttccnttttttttttaagacagggtcttgctctgtggcccaggctggactgcagtggtgaaatcacagctcactgcagcctctacctcccgggctcgggcaattctcccacctcagccttccaagtagctgggactacaggcacacaccaccatgccgagctaatctgtgcatttttttgtaaagacaaagtgtcactatgttgctcaagctggtcttgaactcctgggctcaaacaatctgcctgcctctgcctcccaaagtgctgggataataggcatgaacaatcacacctggccaaaatctccatttctcccttatgaaacatattctcatagaatcttaggaataataggccttaaagtctataaataagggaaaaaatccattgacattaggaacctgcgaaaaaaatacataacaaaacaatcagtgtttcaggcacctaaattgtgaacaaatcacactatctacacgtagctatttccatagacccgtagaaatatctctgcctaaagacacagacaagtatgttctctttctcacatatcaaggagaaaaacagtagaacgttgttgtacactgnctaagaaacaattggtctttaaaacagactcaataaaagcaaaatgnctttncaaaagggtctaatacttcctgccttctaaaggggtctaatggcatttttttttaattaagcaaaaagtgaatagaatggaaaaatttggggtcttcatattaactactnacatntacn

SEQ ID NO: 250 - DNA, 789 bp, Homo sapiens
  misc_feature (1)..(8): n is a, c, g, or t
  misc_feature (10)..(19): n is a, c, g, or t
  misc_feature (24)..(27): n is a, c, g, or t
  misc_feature (31)..(31): n is a, c, g, or t
  misc_feature (652)..(652): n is a, c, g, or t
  misc_feature (678)..(678): n is a, c, g, or t
  misc_feature (734)..(734): n is a, c, g, or t
  misc_feature (752)..(752): n is a, c, g, or t
  misc_feature (763)..(763): n is a, c, g, or t
  misc_feature (765)..(765): n is a, c, g, or t
  misc_feature (769)..(769): n is a, c, g, or t
  misc_feature (787)..(787): n is a, c, g, or t
  nbla-10875-f
nnnnnnnntnnnnnnnnnntttgnnnncctngagcactgttggcctactggactttgcacatgatgtatcacgaagctacagcttgccatgtgactggagatttagtagaacttctgtcaatatttctttcggttttgaagtctacacgcccttatcttcagagaaaagatgtgaaacaagcattaatccagtggcaggagcgaattgaatttgcccataaactgttaactcttcttaattcctatagtcctccagaacttagaaatgcctgtatagatgtcctcaaggaacttgtacttttgagtctccatgattttcttcatactctggttccctttctacaacacaaccattgtacttaccatcacagtaatataccaatgtctcttggaccttatttcccttgtcgagaaaatatcaagctaataggagggaaaagcaatattcggcctccgcgccctgaactcaatatgtgcctcttgcccacaatggtggaaaccagtaagggcaaagatgacgtttatgatcgtatgctgctagactacttcttttcttatcatcagttcatccatctattatgccgagttgcaatcaactgtgaaaaatttactgaaacattagttaagctgagtgtcctaagtgcctatgaanggtagccacttcatcttgcactggtncccaaactttggactgactatgccagactcaagctgctatgtcaaaaaactggatnaagcttttgggggaaaancctggtttcgnanaatntattaaatggatcctaangg

SEQ ID NO: 251 - DNA, 791 bp, Homo sapiens
  misc_feature (1)..(4): n is a, c, g, or t
  misc_feature (6)..(7): n is a, c, g, or t
  misc_feature (9)..(14): n is a, c, g, or t
  misc_feature (35)..(35): n is a, c, g, or t
  misc_feature (607)..(607): n is a, c, g, or t
  misc_feature (650)..(650): n is a, c, g, or t
  misc_feature (671)..(671): n is a, c, g, or t
  misc_feature (685)..(685): n is a, c, g, or t
  misc_feature (760)..(760): n is a, c, g, or t
  misc_feature (787)..(787): n is a, c, g, or t
  misc_feature (790)..(791): n is a, c, g, or t
  nbla-10875-r1
nnnngnngnnnnnntttgtggcctttttttttttnttttatttttacatcaagtgtgctttatttcctccacaggtattctgttaaataaagcaccatttatatactgccaggccacagctaaagaggattctttacagaatcaaatttcttgtggttgttccgtatacaagtaaacttaattttgataataagaaccacagcgatcggaggcaatctgcctctataaggtacaaaactggcacagaggacaccatatcatacacagtaaaaatgctgtaagtttaaattacattgtacagggctaggcaaccctgttcttcccagacagccatattaaatgaaagccactaaagtgaactcttaattacataaaacatatccattatctgattgccctttaggaagtatactgaagatgcaagtttttttcatctggagttctgcctgaccaagaattaagcctataaatctatcttgccattcaagcagagagcactggacaaactgaagcacaaaaacaaataagcaaaacttatacaaacagcatgggggttgggggtgagggacttaaaagtagacatgctacacctaatgtcaagaagcancttggtttcctttgccagatatccttgtgacgacatggattgnagattcaatggtcctacacanggtatctaaaatgncatggtgcttcatatgactaaagagtctttgggaatgggcccactgagagataaagcaccttaaggtcctggganggcaaaacttgggcattacaacttttnaann

SEQ ID NO: 252 - DNA, 789 bp, Homo sapiens
  misc_feature (1)..(10): n is a, c, g, or t
  misc_feature (14)..(17): n is a, c, g, or t
  misc_feature (19)..(20): n is a, c, g, or t
  misc_feature (24)..(24): n is a, c, g, or t
  misc_feature (27)..(27): n is a, c, g, or t
  misc_feature (33)..(34): n is a, c, g, or t
  misc_feature (570)..(570): n is a, c, g, or t
  misc_feature (712)..(712): n is a, c, g, or t
  misc_feature (764)..(764): n is a, c, g, or t
  misc_feature (774)..(774): n is a, c, g, or t
  misc_feature (779)..(779): n is a, c, g, or t
  misc_feature (788)..(788): n is a, c, g, or t
  nbla-10881-f
nnnnnnnnnnttgnnnncnntttngantcctcnngcactgtggcctttttttttttttttttcaaattccaaccagaagctaaatacaattggaaactggtaagcactagttttactccaaaggagtaggatcattcagatttactccaataaaagtatgcaacccttaagcaaagcttttcttcatttaaaaggagaaaaaaaaaaaacctatacagtagtctttccttatgttcattgcacaaaatgagttctgcttttagaactttgacactcaatggttaattttacaatttaagattccaactttataaccttttttctactccaaaacacccttgtaaagtttttctttaggatggtgtaaaaaccagcatttctgcacaattcactggaatttttttctttgtaataaaaatctcttctctgtaaaaccaaaaacaaaacaaaacaaaacaaaacaaaaccaaaagaaaagtcctctacctatcatggtttctgcagctatgcatgtatttctgttttatagctgctttatagctacttcagactccagatctgctttaatgngtataactgcatccacacgcagcagaatactcttacaatagcaacttggggaaagagatctggaaaaaaaaaatcatgagtaccaggaaacaaacatggcccagtaaaatatgaggcaaaaatgcctacaatgagatgcgtntttcatttaagatttctttccatgggtggaatttcctttttttaaaccagtntgggcattanaaagnattgacagng

SEQ ID NO: 253 - DNA, 784 bp, Homo sapiens
  misc_feature (2)..(2): n is a, c, g, or t
  misc_feature (5)..(10): n is a, c, g, or t
  misc_feature (13)..(13): n is a, c, g, or t
  misc_feature (32)..(32): n is a, c, g, or t
  misc_feature (378)..(378): n is a, c, g, or t
  misc_feature (440)..(440): n is a, c, g, or t
  misc_feature (612)..(612): n is a, c, g, or t
  misc_feature (640)..(640): n is a, c, g, or t
  misc_feature (681)..(681): n is a, c, g, or t
  misc_feature (686)..(686): n is a, c, g, or t
  misc_feature (744)..(744): n is a, c, g, or t
  misc_feature (759)..(759): n is a, c, g, or t
  misc_feature (764)..(764): n is a, c, g, or t
  nbla-10881-r1
gntgnnnnnnttngtggcctttttttttttcnttttggaaagcaaggatcacacttccccctccctgttccttaatcccttttctaaaaaggggggaaaatccggatggattttagggattggtctggtgtcagctgtgttttattgcacacctaaatcctgattataggcttttcatttctccgcaaagcctttattttggcagttaagccaaatgtgttttccagaaagttagttattttctcctctttctttcctttctttcccccctttttcccgtctgaccccaaacgttattgtccaaacatgactggacagcagcttttgtttcttgaccctgtaatatgacagtctgctaatattgacagaaggtgcagnttttgggttatagtcgtgattttcgctaatcaatcatattagcaggaaaaaaaatgacttgnttctgttgtacttgagtcttaagaaaaagtgcccatagtttaagtgacaatttccaaaggctttagtaccacctgtatttcaaaatgggggacccaaactcccggaagaaacaagctctgaacagactacgtgctcagcttagaaagaaaaaagaatctctagctgaccagnttgacttcaagatgtatattgcctttgnattcaaggagaagaagaaaaagtcaagcactttttgaaggnctganggtataccagcatgacaaataattatgaagaaaatatcctgaaaggtgtgcgaaaatncagcttttccttggnaagtncctaaacctttacagaagga

SEQ ID NO: 254 - DNA, 2690 bp, Homo sapiens
  nbla-10895
gcctgtacggaagtgttacttctgctctaaaagctgcggaattcctcgagcactgttggcctactggaaactccgagtgagccagtattcataaaaaatgttaaaaagcagaagaaaggacacaagataaacaataatttggataattcgtaaattggtatttcattcttgacttcttgagaattcattgtatacgctactcctcaaaaataaggaaaaccataaacaaaaattctggtctgaaatatcttggcagtaatgtgtttgctctcccctgtcctgaatattttaggctaactttcaattaaaatggattgcaattaaattattttgggcagaaatgtgtcttaacctttgacaaagttgatcatttcagcattttcaaatgcttaaactatttcttaaaatgacacaaattgtggcgttgccatttaccgaggtttacatgctcttgatgcttaaggattcggctttcttttttcccccgcatttattcactgaaaacatgattgattcagttttgtacctatgcagaatgccactgacgtgatgccaaatatgccctatttagaaaaaataaaaattaaaaggatatttttctgcacagtcaaaattatgcagatgtggatttaaaagactacatgtcaaaaaatacgcaagtaaagtttacttactccatgtttccttttacactcacagacagcagatttacaggcaccaaacagccttcatcaagacaatgaaatgcccagtgtggctctttgatgacttcattctgtctttcacgtatgcccaaaccctcataattgcaggtgctttttctgtacccaattatttggggtctctgtgttattcccaggcatgcttaggtcattctggtttcccagggctccctttagggcctctagatatccaagttgtcacagtctcatttctcagcttagtctttccagactctccaacatacccatgttcaattctacatcacatggcatcaagacagggactcaacattgcctaaagcagtttgggtcactaacttatttgataaactaatttctgttaaggctctttgttctttcattctcagctgaaatgtgtgtatggcaacaggggcctcccatggacagtccacttttggaagctcttggatggtgtcaccatgaaagagtagagaaagatgtttaggaatgtgcccacttgatgcgagaattgtgagaacagtccttcatagatggacaatggtgggttcattaaatagcactctgggaataaagtctcttggtaaagtaagcaagagaatattcataagctggccagtcgttcattcttccatgcacacatttgttcagtacattttattgtgctaggtcctggagatacagaagagaggagttagacactccatctccatgtgtggtttacagtctagcagggatgcatccatgtgagagagctgtgcacctgttcagttttgctcacctctagcccagttgaaaacaaaattatggacaacaattaatctaataaaaaaataataagttagtcaagtgttgattcagatcacatgcctctcattgttcgtctctggacaaagttgtgaagaatgctgcatctcagactgcccatgttattgactttttttaaaatcacctggtaatccctttctcctcatatcaaatgcaaacacagcactctctcagactcacttataagagtgcgtttttatccattcttactcttgcttttccttttattctccctctgcccagctataacaaattggattgtgattttgtccacaattattattcctaaaatgacatttatatttggaattgtattttcattacagagaaacaggttaaaaatcaagtcacaattgaaatagggaaagaataccctgaaagatatagtttagcagtaagtgtatttgtacactgataaactgatcttccgaagagactgtttatgattttggcagtgcctcattttttaggtctttgtctttaaggaacccacgtgtggttggggaaagcacctcaatctctgcagttcatatgtagaaactcttataagccttgtgagaggtctgtgttcccttcctgactgtcctacacctactatcttgaacatcagaaacactgatgttcaagaactttgattaccctcatttatctgggagctgtgtgacatctgaggcacagttctaagtagaagtatcattcagaaccaggagcaagaatcagatactcgtgagtaaaggtccaaaactgagtggcaatgtaatacttttggttttcaaataaagagattcataagatttatctaatcaatctactaatgcatggctctatataagtttgctagcataatagattaatcatggtaaatctatttctaatctattccttataacttactatttctccttctactatgacatcttcattttttgtctttaatgctcatccattttttcttctctgtacgtgaatcttagagcccacaggtaactgacacagaatgttgagaatagtaggatacaaaaagtagtggcattttggagatctggtagtcccttagacaatattccttacatttgtctatttggtttgctctcctgcattttgtagactcattcctagcaaaaaaaaaaacaaaaaaggccacatgtgctcgagctgcag

SEQ ID NO: 255 - DNA, 2457 bp, Homo sapiens
  nbla-10909
gcctgtacggaagtgttacttctgctctaaaagctgcggaattcctcgagcactgttggcctactggcttgcaataaaataatgcaaatgaaaacacatgagggtaaaataataaaataagataaaaattatttaaagcagaagccgctagtcagggttagtaaataagcttagtggagttcatgaacccactggaattccatgtatatttttgcatatctgttttatggaggtggtccttcatacggccaatcaattcattgattctgagtgatttgattatgatttgcttgcctaaaagaataatgtttagatgattttgagcatctaagaaaacctgatagttataattttgaactggtttgccttaaagttcttgaatataatttaggaaggtatgttaagacacacatatgtgtgggtgtgtacagggggagtacaaaaaaaaccacatttttaagttcagaaaaaaaatcattgcaatttgttgtaaacagcatggactaatgatacaggatgatgttggttgaattttcaggactagcaatgtaactttgcaatggatacgtagatgccattcaaataagtgattctgttatttatcctgtttttttaaagtaaaaatattaaacataacttagtttgtataagaaaaaataattgcaggaggtaaatgtaacctgtctgagataacacacaaaactctgatgattgtattttggagttaagactatgaagctaaaaaatgtgtgtgcacataatttcaaatattaggcccaagtaattttattttcggaactgctcattaattatgggagcactcagtgtttcaggaagtgttaagacttcagggtttcagcaatgaaattgataaggctcttccctagatctaagaagagacagacaataaacattcaaaagcaagaacataagatactgataaattctaagaagaaaacccagtaggatgatatacaggggtgtgactaggaggtcagaggaggttgctctgaggaggtgatgtttatgcaaatctgaatgataggaagcccagcaagagatctgggagcagagccttccagggaaagggaaggacctgtgcaaaaccccagaggcgaagtccatctaggcttgctcaaagacaagaaagaggacaagagcattaagtgtggggagagtggcaagaggcaagatcatcaggcaagggcgcctcagacaagaccacgccaaggggagagcacagggcagagcaggactgtgtggaaattccaacgtgaatgacttccaaaatcaggacacaggctctctccccagcctgacctcttctggtgcttaactaacttgttagcaaaactccttggggcacagcactgagtcctccagccaggctgcccctttgtattgacatggcagggatacaggaggcacgagagactgtaactttctagagttagaatgtctctagtaactctagagacattttagtgctaacttacaattgatctggcaaaggaagataggcagaactattaaagtgttcaatttccttccagagagattcttccattttctctcattacaaaaccagaagatcagctgtgtggggccatcagctcccagcctaaggtcctataacctgaagcttgaaggcaatcagtacctctgctttataattgatcactttgaggagccaaaggaaagagtgaaagattgggactgctttgagtggagatggcactgaactcgttgtaataactacaaatgcaatttaaagtaaaagcatgagtatataaattgaaagggcaggtggacagaaagaagagactgactcctagacaggtgctgagaaagcagtgtaattaaaaagataaggaagggaaaggagctacaacatataccacacacacacacacacacacacacacacacacacgttatcagacattcaaaaaattagatcttagactccacaatacaaatcccagaggacaatggattacagtgttgacaggggagaaatattgtgataaaatcattgcatacttagttatgttttcattgttaaagaaataaacagaccattttgaggtagttaaacctcagagaagaatagcatgtatttactcttcttgaaatctatgttggctttatgccccagctgagataggaatcaaaggtgaggttgaaaataaatagggataatataaaccgtccaccagattgtgttaaatctaaagaatcgttcagtattttattgtatctcactgtatgtgaaaagaaacaagtttcaccaaacaatacttagccttattttgtatatgcagtgcattataatattttctattttgttctgtctctttttttgttcatgcttgacacaaaacattaaattggttttgcaacctacaatttgaaataaaaaaaaaaaaaaaaaggccacatgtgctcgagctgcag

SEQ ID NO: 256 - DNA, 821 bp, Homo sapiens
  misc_feature (3)..(7): n is a, c, g, or t
  misc_feature (9)..(11): n is a, c, g, or t
  misc_feature (511)..(511): n is a, c, g, or t
  misc_feature (590)..(590): n is a, c, g, or t
  misc_feature (605)..(605): n is a, c, g, or t
  misc_feature (619)..(619): n is a, c, g, or t
  misc_feature (622)..(622): n is a, c, g, or t
  misc_feature (706)..(706): n is a, c, g, or t
  misc_feature (749)..(749): n is a, c, g, or t
  misc_feature (759)..(759): n is a, c, g, or t
  misc_feature (762)..(762): n is a, c, g, or t
  misc_feature (790)..(790): n is a, c, g, or t
  misc_feature (792)..(792): n is a, c, g, or t
  misc_feature (798)..(798): n is a, c, g, or t
  misc_feature (802)..(802): n is a, c, g, or t
  misc_feature (805)..(805): n is a, c, g, or t
  misc_feature (817)..(817): n is a, c, g, or t
  nbla-10919-f
ttnnnnncnnntttgaattcctctgcactgttggcctactgggagatatgactgtcagttgcagtgagttctgcatcccaagtggagggaattgggtttgtggcaaagagcttgacccagaaatagatggtgccccccaaattgtctccacatgaagatgtactgatgacgccccagaaatgctgcttccatatcagctgctgctagcgccagcgcagactctcagggagtcaccacagcttgtcttgtgcttggtgagtgagggtctctctactcagtgtcagacatctacaggaaagaaacaactggtggaaaagagcaataaattgcccggtgctctgcagggctggaatttcaaacagaaagagggaataagatcctgtgatttttctcacctgcttttccacgcactgtggtcatcactgtgcaatctacatctagtatgaaatccacacataggagagctggggcacaaggggactggaggcagttgctttgcaagatggctgangagaaagcacactgggaacacaatccagaatggtctaacaataagttttcaagtgaataaaccactggcaagacaattncatgtgcacctttanggtacctatatagnctnctaagaagatcaggatgaaagacctagatgatcccctgaggataaaaccttcatccctaaaatgatttttttaaatccactgcnttactgtccaggaggcaaaatgtttttctggctttgggccaantcctgctganacnggattttactcttggtaccaaatctatntncctaangcanggnttcaagcctganttct

SEQ ID NO: 257 - DNA, 837 bp, Homo sapiens
  misc_feature (2)..(3): n is a, c, g, or t
  misc_feature (5)..(5): n is a, c, g, or t
  misc_feature (8)..(11): n is a, c, g, or t
  misc_feature (17)..(17): n is a, c, g, or t
  misc_feature (28)..(28): n is a, c, g, or t
  misc_feature (36)..(36): n is a, c, g, or t
  misc_feature (73)..(73): n is a, c, g, or t
  misc_feature (117)..(117): n is a, c, g, or t
  misc_feature (160)..(160): n is a, c, g, or t
  misc_feature (187)..(187): n is a, c, g, or t
  misc_feature (212)..(212): n is a, c, g, or t
  misc_feature (220)..(220): n is a, c, g, or t
  misc_feature (233)..(233): n is a, c, g, or t
  misc_feature (235)..(235): n is a, c, g, or t
  misc_feature (275)..(275): n is a, c, g, or t
  misc_feature (309)..(309): n is a, c, g, or t
  misc_feature (373)..(373): n is a, c, g, or t
  misc_feature (400)..(400): n is a, c, g, or t
  misc_feature (428)..(428): n is a, c, g, or t
  misc_feature (487)..(487): n is a, c, g, or t
  misc_feature (493)..(493): n is a, c, g, or t
  misc_feature (499)..(499): n is a, c, g, or t
  misc_feature (551)..(551): n is a, c, g, or t
  misc_feature (556)..(556): n is a, c, g, or t
  misc_feature (620)..(620): n is a, c, g, or t
  misc_feature (622)..(622): n is a, c, g, or t
  misc_feature (641)..(641): n is a, c, g, or t
  misc_feature (676)..(676): n is a, c, g, or t
  misc_feature (687)..(687): n is a, c, g, or t
  misc_feature (710)..(710): n is a, c, g, or t
  misc_feature (742)..(742): n is a, c, g, or t
  misc_feature (752)..(753): n is a, c, g, or t
  misc_feature (764)..(764): n is a, c, g, or t
  misc_feature (772)..(772): n is a, c, g, or t
  misc_feature (774)..(774): n is a, c, g, or t
  misc_feature (779)..(779): n is a, c, g, or t
  misc_feature (784)..(784): n is a, c, g, or t
  misc_feature (796)..(796): n is a, c, g, or t
  misc_feature (799)..(799): n is a, c, g, or t
  misc_feature (815)..(816): n is a, c, g, or t
  misc_feature (818)..(818): n is a, c, g, or t
  misc_feature (820)..(821): n is a, c, g, or t
  misc_feature (824)..(824): n is a, c, g, or t
  misc_feature (835)..(836): n is a, c, g, or t
  nbla-10919-r1
gnngnagnnnnctttgnggccccttttntttttttntggtttcagtagtttattcacatttttttttctctgnttattttaatatgcaccacgtgtaagttagatgagggctacggnaaaaacatttttgatgactgaaatcttacttttccttctaacnatctggagcaaatcacatattcattgntcatgacgaataaaatgatttctgntacaatgntgagaaaaaatgngntcattaatatgaacacatgtctacagagatgatttacacnatgcaagtaatgaaagagttcttccttaactagnctactatcaaactgaaaagatgaatcttaaaattcccttgaaaataccatatgattggtcatgngtcagtaaaagaaagacggtccccatnaccaggccaccaccattagagagctatnttaaatacttgggaaaaaatatggaaacaccggtggtgatgattaaattgataattacntagatncactgncataatgatacatatttggtctatgataagtgaaatcaaaaataagatcaanttggntatagaaattccttaaagaacaccaccacttaattatttcaaacttggactattccaagaatgncnagaaaaaaatttgaaagcnctggcttaaagccaagcaatctggatccccaatgnagtcagcatgncttgggcttggctggtaaccctntggggacatttttgacattcaggacttgggancctaatggtnnaaagaatggcnttcatttngntactnaaganttttacttgctnggnacattcactggtattnncntnnacnctcaattttcnng

SEQ ID NO: 258 - DNA, 1788 bp, Homo sapiens
  nbla-10927
ctgtacggaagtgttacttctgctctaaaagctgcggaattcctcgagcactgttggcctactggttgctaaaagctggaagttgggctaaaaagattgctgtgaaaagagctcttaaatctgaagatcttagcataaatctaataagttctgaatttgttgggcttgatattcagcagaaacttacagtcttttacttagaacccaagaggtttggaaatcaaatcactatgcaaagaaaatctgaaacacagatttcccattctaaacattcagacatatctacaatagcaggacctaataaaggaacgactgccagcaaaaaacctgggaaccgagaatgcaatcatctttgtaaaagtaaacatacatgtggacatgactgctgtaaaattggagttgcacagaagtcagaaattaaagagtcaacaatttcctcatatttatctgatttaagaaacaggaatgctgtttcatctgttcctccagttaaacgtctgaagatacagatgaataaatctcaaagtgtggaccttaaagagtttggttttactccaaaaccttcccttcctagtatatcaaggtcagaatatttaaacatatctgaattgcctataatggagcagtgggatcagcctgaaatctatggaaaagttagacaagaaccatctgaatatcaagacaaagaagttttggatgtgaactttgaattgggaaatgaagtttgggatgattttgatgatgaaaacttagaagttactagcttttcaactgatactgagaagacaaaaatatcaggatttggaaacactttgagttcaagtaccaggggaagtaagctaccccttcaagagtcaaagagcaaattccaaagagaaatgtcaaacagttttgtttcatcacatgagatgtcggatatttctttatcaaattctgctatgcccaagttcagtgcatcctccatgacaaaattacctcaacaagctggaaatgcagttattgtccattttcaagaaagaaaaccacaaaatctgtcaccagagattgagaagcaatgctttactttctctgaaaaaaacccaaattcttcaaattataaaaaagtggatttttttattagaaacagtgaatgtaaaaaggaagttgatttcagtatgtatcatcctgatgatgaagctgatgaaatgaagtctttattgggaatatttgatggtattttctaaaacaaacaaatactttttatattgataagagaaagaataaagacacctaatcacaaagcatgctttttatttttaaaaagtagttcataattgttcggatttttttctcctgtatttgattagctttgttcactttttgcaacaaaatgtatgggccgatttattttcccattatattgtaacttcttgaaaagctcttttacagtggctttgtttcaataagcccttaagttaagggctgattgcacttagaaataagttgcacttagaaataattatttggctattaattggattttgacaagaaccaatgtaaaatttcatttttatattttcttaacaagaagaaaaatattctatgaaagcaaagtaatgctaacttaatgaatctgcttattgtatggattaatcactaatattattcccatgtattttgttttactaaagatttttaagaatccagtggctatttgaacctactgttatctaactttgagcaacaataaatgaaacattaatcagtataaaaaaaaaaaaaaaaaggccacatgtgctcgagctgcag

SEQ ID NO: 259 - DNA, 815 bp, Homo sapiens
  misc_feature (4)..(5): n is a, c, g, or t
  misc_feature (7)..(11): n is a, c, g, or t
  misc_feature (630)..(630): n is a, c, g, or t
  misc_feature (673)..(673): n is a, c, g, or t
  misc_feature (719)..(719): n is a, c, g, or t
  misc_feature (723)..(723): n is a, c, g, or t
  misc_feature (734)..(734): n is a, c, g, or t
  misc_feature (742)..(742): n is a, c, g, or t
  misc_feature (766)..(766): n is a, c, g, or t
  misc_feature (791)..(791): n is a, c, g, or t
  misc_feature (794)..(794): n is a, c, g, or t
  misc_feature (803)..(803): n is a, c, g, or t
  misc_feature (814)..(814): n is a, c, g, or t
  nbla-10934-r1
gagnngnnnnnttgtggcttttttttttttttactttacaaatagtttatttccccttcacaaattcatgcgcctctgaccattatgcaaggcaacatgaattaaatacttatgtcagaacatatttgtcttacattattcaagataaagtggattttaaaagcaagtgggtaccaatgatggggagatgaggagaatagggcaggcagcaacagggcaacatgcatttttcaagagtgtttattaaaataggcagtaatcagtacatgtacatcatatgagcagtttttcaaaattagcacttccaggagaggggctacatctcagttttttctgtctgtacagtaaaatgccaaaagtacttccctaaagtacaaaggcatttccctagtagtcttggtaccagtaacaatatgattactaaacatctccaatgtggttttcattacaaagaaacatgtttcacataaaagcttcataatataatccagagacagaatttgtgcatgcttacaatttgaagccaggctgaatatatttgatatatattttttcatttctccagtgttttttatttttataaatatgcacctagtttcctaccagtttaaaacacacacgaaacactgnttttgagcaccatgattgccttacagtagcctctttgggactncaatcctagttcaaggaggggagtcctaatttctattctgacttgnttcnttccccaaatnatgttagnggttgcccaaatccatcaattttnagatgccaacaaagggttttgggcnaangggccaatnataattttgant

SEQ ID NO: 260 - DNA, 835 bp, Homo sapiens
  misc_feature (2)..(3): n is a, c, g, or t
  misc_feature (5)..(5): n is a, c, g, or t
  misc_feature (8)..(8): n is a, c, g, or t
  misc_feature (11)..(12): n is a, c, g, or t
  misc_feature (15)..(15): n is a, c, g, or t
  misc_feature (19)..(19): n is a, c, g, or t
  misc_feature (22)..(25): n is a, c, g, or t
  misc_feature (684)..(684): n is a, c, g, or t
  misc_feature (700)..(700): n is a, c, g, or t
  misc_feature (762)..(762): n is a, c, g, or t
  misc_feature (765)..(765): n is a, c, g, or t
  misc_feature (821)..(821): n is a, c, g, or t
  misc_feature (835)..(835): n is a, c, g, or t
  nbla-10939-f
gnngnagnggnngtngggnttnnnntttgattcccttgcactgttggcctactgggcaagattgcactacggaaggacctggataacgctgaggaaaaggcagatgctctgaataaggagctgctgatgaccaaacagaagttgattgatgcagaagaagagaaaagacggctggaagaagagtctgctcagttaaaagaaatgtgccgtcggaaactcgacaaggcagaatctgagattaaaaaaaacagttctatcattggtgactataagcagatttgttctcagttgagtgaaagattggagaagcagcagacagccaataaggtggaaattgagaaaattcggcaaaaagtggatgactgtgagcggtgccgggaatttttcaacaaagaagggccgtgtaaaaggcataagctcaaccaaggaggttttagatgaggacacggatgaagagaaagagacgctcaagaaccagctgagagaaatggagctagaactggcacagaccaaactccagctggtggaggccgagtgtaagatacaggacttggaacaccatttagggcttgccctcaatgaggtgcaggcagccaagaagacgtggtttaacccgaacacttgagcttcataaagacagcaacccggggttcaagggaaagagacttgctgagaacagcttgncggcttccgcaccttnagaaaacacgacaccttttggtgccttctttggcaagatgtgtgaatctgtgacttgtccangancagaatgtacctaagtcaagatccataacgcatgttggtaaggtcacttggaccanaactttgtgaacan

SEQ ID NO: 261 - DNA, 824 bp, Homo sapiens
  misc_feature (2)..(2): n is a, c, g, or t
  misc_feature (12)..(14): n is a, c, g, or t
  misc_feature (17)..(17): n is a, c, g, or t
  misc_feature (19)..(19): n is a, c, g, or t
  misc_feature (30)..(33): n is a, c, g, or t
  misc_feature (37)..(37): n is a, c, g, or t
  misc_feature (669)..(669): n is a, c, g, or t
  misc_feature (734)..(734): n is a, c, g, or t
  misc_feature (739)..(739): n is a, c, g, or t
  misc_feature (766)..(766): n is a, c, g, or t
  misc_feature (788)..(788): n is a, c, g, or t
  nbla-10939-r1
gnagtggggttnnnttngnggccctttgtnnnnttcnttaaaggtgctaaaatccattccatagctttgaagtgagaacttacagcccatctgaacagtgaggtttgtacccaggcatactctgaggagggcccaaaggcccagcccatctgggagggacaggcccggaggatggagacctcgcagcatgtgcaccctgcgcagacatttacagacacgcaactcagtctttctcacttggacaacctgttgtgcaaaaacactaggaatcttgaagtgagggagctctgtccacagctcccgtaatggcagggaggagagcagagcccaatgaaccttgagtgaaattaagtgctcgaataaccacataattaaattgtgcagatcagcagtcctagtctggaatttaaacactgtcaacggggcatattgggaaagatatttatatatatatatatacatacacacacacacacacacacacacacacacacacacaaacacattaagcaaaataagatttgtccatgttataatccagtctcacagtcaagtcacccaccccagccttttgaagtcatttggcagctaatgctaaaaagtaacaggaactatgagagttgcatagaattgatcagaaacatgaataatgccaaacccaaaacctgnaccatcagttaacagaaccaggtggcttcagatgcactatgaaacccttctatttaaaacaaagngcttnttcatgtctacctgggggaccttttgntgggcattgaacagaaaagaantatttgaattctggatccttggccaaccccactttt

SEQ ID NO: 262 - DNA, 816 bp, Homo sapiens
  misc_feature (2)..(2): n is a, c, g, or t
  misc_feature (5)..(6): n is a, c, g, or t
  misc_feature (13)..(14): n is a, c, g, or t
  misc_feature (16)..(19): n is a, c, g, or t
  misc_feature (26)..(27): n is a, c, g, or t
  misc_feature (31)..(31): n is a, c, g, or t
  misc_feature (636)..(636): n is a, c, g, or t
  misc_feature (702)..(702): n is a, c, g, or t
  misc_feature (751)..(751): n is a, c, g, or t
  misc_feature (758)..(758): n is a, c, g, or t
  misc_feature (788)..(788): n is a, c, g, or t
  misc_feature (802)..(802): n is a, c, g, or t
  nbla-10946-f
gnggnngtggggnntnnnntttgaanncccntgcctgttggcctactggttgtcttgctgccttctttgccagagatgaactaaaaggtgacaatatgtacagttgtgaaaaatgcaaaaagctgagaaatggagtgaagttttgtaaagtacaaaactttcctgagattttgtgcatccaccttaaaagattcagacatgaactaatgttttccaccaaaatcagtacccatgtttcatttccgctagaaggcttggatcttcagccatttcttgctaaggatagtccagctcaaattgtgacatatgatcttctgtcagtcatttgccatcatggaactgcaagtagtggacactatatagcctactgccgaaacaatctaaataatctctggtatgaatttgatgatcagagtgtcactgaagtttcagaatctactgtacaaaatgcagaagcttacgttcttttctataggaagagcagcgaagaggcacaaaaagagaggagaaggatatcaaatttattgaacataatggaaccaagccttcctcagttttatatttctcgacagtggcttaataaatttaagacctttgccgaacctggccctatttcaaataatgactttcttttgnattcatggaggtgttccttcaagaaaagctgggtatattgaagacctgggtttgatgctgcctcanaacatttgggataacctatatagcaggtatggtggaggcccactgcaancatctgnacatttggcatcctggccaattgaggcggngaaaattggaaaangaagaaaactggat

SEQ ID NO: 263 - DNA, 826 bp, Homo sapiens
  misc_feature (2)..(3): n is a, c, g, or t
  misc_feature (6)..(6): n is a, c, g, or t
  misc_feature (10)..(15): n is a, c, g, or t
  misc_feature (20)..(20): n is a, c, g, or t
  misc_feature (25)..(25): n is a, c, g, or t
  misc_feature (29)..(29): n is a, c, g, or t
  misc_feature (34)..(36): n is a, c, g, or t
  misc_feature (40)..(40): n is a, c, g, or t
  misc_feature (45)..(45): n is a, c, g, or t
  misc_feature (549)..(549): n is a, c, g, or t
  misc_feature (669)..(669): n is a, c, g, or t
  misc_feature (671)..(671): n is a, c, g, or t
  misc_feature (719)..(719): n is a, c, g, or t
  misc_feature (730)..(730): n is a, c, g, or t
  misc_feature (745)..(745): n is a, c, g, or t
  misc_feature (752)..(752): n is a, c, g, or t
  misc_feature (770)..(770): n is a, c, g, or t
  misc_feature (782)..(782): n is a, c, g, or t
  misc_feature (787)..(788): n is a, c, g, or t
  misc_feature (796)..(798): n is a, c, g, or t
  misc_feature (818)..(818): n is a, c, g, or t
  nbla-10946-r1
gnnagngggnnnnnntttgnggccntttntttgnnncccnttttntttttttttacattttaaagacatttttattgagctaattttaacaacattgctttagctggtgacagctgccccaaaccaaaacaaagccatcatgaatgctattcaacatcctcaatgtaatccagtatgtttttgtacttggaatatagttaaacttttgacattacataatcaagcaaatagcagtgcatactatattattcaaaaagactttatctatttcatttaaaaaatcaagttgcaagtggcctcagctttatcaacaatcgtagtgacacattccacacttcatgctctcaaaataaaaagtgccctaaaactaactctaagttttttagtcactgacattaatactaaccaggttacaggaattgaagtttaacattgtacaatataagcggcaataagttactgatatctgctgacaaattccactcaaactaaatatatccttgatcattcaaaaagacattttgtaaattttaataagctagttagtgnatatgctgcagtgcaaaaaaagtgacaccctagtttcctgagctttaggaaattaacaattttctgctactacttttaacttaaaataggctctttattatatgaagcctggcaaaactntncaattaaattgggcttttgggagaactgaaagactggtcagaagtcangggggatttangacaatggaaaaagnttcaagncaaagtttttccacactnccaaaggttctntgggnnctcatgtnnngggaagattaaagataaccncctggttt

SEQ ID NO: 264 - DNA, 1735 bp, Homo sapiens
  nbla-10949
gcctgtacggaagtgttacttctgctctaaaagctgcggaattcctcgagcactgttggcctactggtgttttaacacttgtttgtgtgagattgtgtgagaaattcaggacctgtacactgcagtacatttgaggattcctggccctcacctcctaaatcccaccagctacccttcccccattattttgagaattaaaacacctacttgtttccagatgccacctgcctctgtgagtgtgggcatgagtatgtgtgtgttgcggaggtgggtgagggagttggaggagttttgttacacatctgagttatttcatcatggtaagatgttattgttctttcatttcattaaaaaaatctgtctaattctttaaaaatagagttaaagaaagaagatatttatgcagtggagatagttggtggtgctacacgaatccctgcggtaaaagagaagatcagcaaatttttcggtaaagaacttagtacaacattaaatgctgatgaagctatcactcgaggctgtgcattgcaggtgaatattctttcttttataggtaaccatttataaatcattgtaacaagatggcagtggtttatgtatctaataacctgggattagctcagggtgacttcagggtgttgagattccaaaacctttgttttaaaatagaggtgatgttcctaaaaataattgtactctatagcacataagatgaattaattgactagaaacataggtaactctgagcctgaagtatgactggaagtttggcctgttatgtatgtctgtatgaaatagtgtacattaattaaataagggttggggttaatagaaaaataaggaatagctagattatataggtaattgacatgatagaagtttgtaaaactgttcagacaccattaaattactaatataaatattttaaaaagaccattgattttctgaagtaatttgtatgtttaagtgatattatcagtttatattgtctatacttgttaaacggaatttttgaaaattattattctagtgtgccatcttatcgcctgctttcaaagtcagagaattttctatcactgatgtagtaccatatccaatatctctgagatggaattctccagctgaagaagggtcaaggtatcatgtttattaatcatttacatatctaaagttaattgactattaggtctgagtaatatgttgcttttcatttcagtttacataaatctgtaacattttatcatagtgcatgaaggaagtggtcatttattttagtcagaataaatttgtgtccttaattagtttctcacacttgattctgctgaaatcatcggtgccttttatgtgcagattgacgtatattccttttttactgactttatatataaagattcttgggaactcttataatctggaaataataccaattgaaaagagagagaaactaacactgtacaataattacaaacctagaacacatgggtaaaagtgttaggaatatcctgaatttgtgtttttgtctttttcctccattcagtgactgtgaagtcttttccaaaaatcatgctgctcctttctctaaagttcttacattttatagaaaggaacctttcactcttgaggcctactacagctctcctcaggatttgccctatccagatcctgctataggtaagtaaagagttggaaattaaaaaaaaaaaaaaaaaaaaggccacatgtgctcgagctgcag

SEQ ID NO: 265 - DNA, 725 bp, Homo sapiens
  misc_feature (2)..(3): n is a, c, g, or t
  misc_feature (5)..(5): n is a, c, g, or t
  misc_feature (8)..(13): n is a, c, g, or t
  misc_feature (18)..(19): n is a, c, g, or t
  misc_feature (22)..(22): n is a, c, g, or t
  misc_feature (25)..(26): n is a, c, g, or t
  misc_feature (29)..(30): n is a, c, g, or t
  misc_feature (32)..(32): n is a, c, g, or t
  misc_feature (612)..(612): n is a, c, g, or t
  misc_feature (620)..(620): n is a, c, g, or t
  misc_feature (659)..(659): n is a, c, g, or t
  misc_feature (676)..(676): n is a, c, g, or t
  misc_feature (686)..(686): n is a, c, g, or t
  misc_feature (708)..(708): n is a, c, g, or t
  nbla-10967-r1
gnngnggnnnnnnttgannccnttnnttnncntttttttgtgattcaaagatttactaaggtactctatgcattctatctatacagaaacacctatttattattacagttgatttatgcaggattaacatttttggtgttaaaattgttaaacatcatgcttactgcacatcaactctccataatgaatctgaacttcacaatgatttaccaaacactttacttaaattactaattaaataaatgaaaaatgcaccgagccaaacaaaacttaactgggctataaagaaaaaaacccttcaaaacagtccatatacacatctatttcaaaactacctttgctagctagcccctttcccaaagttttagcctgaaaaaacagtaaaatctacacaaaattttattgcaatcatacaagggttacattaggtcaacaaatactatgatgcaattttacatttattaaactacagttcaaagcacaaatttacacattctaaatacactaaacgttatctaatgaagtcacactggcttctaacatttgatatatctgggtgaaagacatgaactttacaagactttaaacacaaatccttagtataaaaactgngttcttgnatgtaaacgatttaatggggaacccaattaatgggcttncatcttcactaagcatncatttggtgnatatttattttaaacgcttaangggtaggacaaactggt

SEQ ID NO: 266 - DNA, 710 bp, Homo sapiens
  misc_feature (3)..(5): n is a, c, g, or t
  misc_feature (8)..(8): n is a, c, g, or t
  misc_feature (17)..(17): n is a, c, g, or t
  misc_feature (24)..(24): n is a, c, g, or t
  misc_feature (352)..(352): n is a, c, g, or t
  misc_feature (571)..(571): n is a, c, g, or t
  misc_feature (678)..(678): n is a, c, g, or t
  misc_feature (680)..(680): n is a, c, g, or t
  misc_feature (683)..(683): n is a, c, g, or t
  misc_feature (685)..(685): n is a, c, g, or t
  misc_feature (689)..(689): n is a, c, g, or t
  misc_feature (693)..(694): n is a, c, g, or t
  misc_feature (709)..(710): n is a, c, g, or t
  nbla-10977-f
ggnnnccnttttgaganccctcgngcactgttggcctactggaagtagttccttgaatgtctgttgatgaaatagtcactgtttaaggaaaaaagtaattatgaggtgtagcagattgcagaaaaacaggattagaaacacacttaaaaagaacacacatttagagtctctcttcctcctcagcgaaccactaggccccctttttaaaaacacctttagagcctaattactccaataaaagtaactagaggtttggagtctggttaaataaattctgagtaaaattcttaagccaaatggaaattcttaatgcaatcatgaggacttctattgtctcttactgttgtattanatcctataaattgaactgatttttccataaggaaaatgcttcttttgagattaattctaataacgtatttgctattgcagtgcagagcccactgcaactgctaggactgaaagcagaggctgggtgccagagcacgtgattcttaacatcatttccacagacccctctgccctgaccctctgcattggatgcaggaagctgggaaagactgatgttganttggaaacatgggctgaaaatgaaggcccatagtgcataggaacaagtaaagccagggtgcttgacgtgtgtgtgtgtgtgtgtgtgtgtgtgtgtgtgtgtgtggngntgngngtgnttgnncctgcacccctacann

SEQ ID NO: 267 - DNA, 717 bp, Homo sapiens
  misc_feature (2)..(3): n is a, c, g, or t
  misc_feature (5)..(5): n is a, c, g, or t
  misc_feature (7)..(7): n is a, c, g, or t
  misc_feature (11)..(13): n is a, c, g, or t
  misc_feature (22)..(22): n is a, c, g, or t
  misc_feature (592)..(592): n is a, c, g, or t
  misc_feature (595)..(595): n is a, c, g, or t
  misc_feature (606)..(606): n is a, c, g, or t
  misc_feature (638)..(638): n is a, c, g, or t
  misc_feature (653)..(653): n is a, c, g, or t
  misc_feature (666)..(666): n is a, c, g, or t
  misc_feature (672)..(672): n is a, c, g, or t
  misc_feature (704)..(704): n is a, c, g, or t
  misc_feature (712)..(712): n is a, c, g, or t
  nbla-10977-r1
gnngngngttnnntttgtgtgncctttttttttcttttttgaattaagtctcatttattctagggcaaactcaaaagggttttttttttttcttttttagcaaatcctagcacattattaacaaaaaaatctgtacatttgccatgatacacttgaaagtgaaacaaataagatataaatacagatatggatgtaacatgaaaaagccccccccccaaaaaaacccaaaaaacaaaaaaacccacccaacctgggggtgtggggaccatgcgtgtgaacacagtgccaacataactattttggtggctgatattttttcagagcacttctttatttccaaacattattgttagcaaagtcctggtgggattctacaaagttcttatttgctgtcctttaaagtgtaacattacgcttgataaataaagggtggcagggaaagaaaaagactgatgagacaaagtcagttgcattacctgcacagggtggtaagctagtgaggcgcatagaaaaggcaggcccgtggcatcgccgcaggtccgggaagcacacacagtgtacttgaaggaagctgcgtgccccgaggaccggntgnaccctgcccanaccctggctgcaagggaggcaacaacttggangaacagggagtcaancccgccagcccgnatggancaacgggggtcttgggcctggcagtccggtanacagggangcaaa

SEQ ID NO: 268 - DNA, 1979 bp, Homo sapiens
  nbla-10993
ctgtacggaagtgttacttctgctctaaaagctgcggaattcctcgagcactgttggcctactggaggatgcgctccccggcgcccagcagcagaggccaccgctcccagaaatgcatgcgaccgatccccttctcccggaccccaggagccggcgcccccgccctgtagggttacgactcactgattaaaaagagggactttttcaaatactttgcacttttgattgtgtattatggataccaaggaagagaagaaggaacggaaacaaagttattttgctcgactgaaaaagaaaaaacaagccaaacaaaatgcagagacagccacagctgtagctacaaggactcatactgggaaggaagataataatacagtagttttagagccagacaagtgcaacattgctgtggaagaggaatatatgactgatgagaaaaaaaagagaaaaagtaatcagttaaaggagatcaggcgtacagaactaaagagatattatagtattgatgacaatcaaaacaaaacacatgataaaaaagagaagaagatggtggttcagaagccccatgggactatggaatacactgctggaaaccaggacaccctaaactccatagcactgaaatttaacatcactcccaataaattggtggaactgaataaacttttcacacatactattgttccaggccaggtcctttttgtgccagatgccaactctccttccagtaccttaaggctatcatcatccagtcctggtgctactgtctctccttcatcatcagatgcagaatatgataaattgcctgatgctgacttagcacgaaaggccttgaaacccattgaaagagtcttatcgtctacttctgaagaagatgagccaggtgtggtgaaatttttaaaaatgaattgtcgatacttcaccgatggaaagggtgtggttggcggtgttatgatagtgactcctaacaacatcatgtttgaccctcataaatctgatcctctggttattgaaaatgggtgtgaggagtatggtctcatctgccccatggaagaggttgtttccattgcgctctacaatgacatttctcacatgaagatcaaagatgccttgccatcgtaagacatttatttgtttaccaggaaaaaaggggtgttgagagagctaaatgtagcttaaaaatgagggcatttgcatgattgagggattgtgtagaggtgattttgaagatggaagacttgtgcactgaagaaaatgagaaaaatgagaagaaatgaaaagaataaaatcaatgatgggaaaagttgaacatataacgattaaaggagaaaaacaaagaagccgtcatgtaaaaatagtatttgttgggcttatttttctaaaaagcagtgcacgttcttaatgaaattatgaaggaagaaaggcagttctctgaaagaagtttatccaattatcaataagagaataatgttttcttctgggtttaattaaggagagttatgtttgtcttcatttaacttctaggaaaagcagtctccctgattcatgtcctccctcagtcctgcatggagagaggtttgggtctacagtgtagtggtagccaccttctcatgctgtgaagagggagtaataccagtttgctttttccctgaaatacagatgaatatgacttcagtcctgattacttttgccttataatgctggatttattgtaaaaaagagagggaagctccccaggaaaaaagagaaagcattaagaaagctcaggaaattgattaactgatacagataatctgatttttactgtcctttcgctctactgtgtctgtttctctataaaagccagcagtaaaaaactttaaaaaccttcagtgatgggaagaggcaaagcagtaggtcctaacagtaaagagggaaactagcccttggggcttatatgaaaaaaaaaaaaaaaaaggccacatgtgctcgagctgcag

SEQ ID NO: 269 - DNA, 727 bp, Homo sapiens
  misc_feature (2)..(7): n is a, c, g, or t
  misc_feature (15)..(15): n is a, c, g, or t
  misc_feature (18)..(21): n is a, c, g, or t
  misc_feature (27)..(29): n is a, c, g, or t
  misc_feature (36)..(36): n is a, c, g, or t
  misc_feature (649)..(649): n is a, c, g, or t
  misc_feature (683)..(683): n is a, c, g, or t
  misc_feature (718)..(718): n is a, c, g, or t
  nbla-10999-f
gnnnnnngggggggnttnnnntttgannncctttgngcactgctggcctactggctgttccagaaaaactgttactccccctcacccactccctccttccccagttgttcccttcagactcaggggctccaccaatgccatcccaaaacagggtcagacactgcccagcttccctccaggaggttcttgtctctgtgtaagggcttgtctccctcccagtttttcttttgctccacgtcattttgtcaggctggttataagccggaggcagctttaaccagcccccagggatgattgtgaaggaggcccctccccttgtgaggagggggcactcctctccagcccctggtaccacagtcctcacgatggtgcagtgatttctagccaggcgtcaagatgcgctgctttccctctcctgcctcatcccttgttggcagctccagttcaggccgtggagggacgtgatgctgggctgtgtttactaaacccacgggttttcagcctcttaagcccagctccgatctccaattaagttgagagcgctgggttgactaacctctggtatctgagcacagacagagggtgctgtgggtctgctgggtggcagaaatggttccttccggcttggcgttctctcctggcactcttnctgctgcctctgactactcagccttggtttcggngtgaagccccaactgccactgggaactggcggctnatgcttgct

SEQ ID NO: 270 - DNA, 731 bp, Homo sapiens
  misc_feature (2)..(3): n is a, c, g, or t
  misc_feature (7)..(12): n is a, c, g, or t
  misc_feature (18)..(18): n is a, c, g, or t
  misc_feature (27)..(27): n is a, c, g, or t
  misc_feature (31)..(31): n is a, c, g, or t
  misc_feature (510)..(510): n is a, c, g, or t
  misc_feature (631)..(631): n is a, c, g, or t
  misc_feature (667)..(667): n is a, c, g, or t
  misc_feature (680)..(680): n is a, c, g, or t
  misc_feature (713)..(713): n is a, c, g, or t
  misc_feature (723)..(723): n is a, c, g, or t
  misc_feature (729)..(729): n is a, c, g, or t
  nbla-10999-r1
gnngggnnnnnnttgtgnggccttttntttntctttttttttgcagggagtgcaacatttatttcataacagaaccccttttccacagagcagctgacagggggctgcatgaaacatactttggaaattaaagtgaactctccacttgggcataatgttatgtgggcacatggattggcttaaaagggaaacaagaatacttcaacatttgatcaacagtaggcagttgctggacattttagaaaaaggagaaatccattttttgaccatggctaaacatggggaaacagcatcacattttcctgaaccaccctaatcccagcccctcaagatccaccaggtatgcaaccccaaaccccagtcacatacattaaatctacacttttatttttttgttgtaaaatgtgctttttcctcaatgaactttaatcagtccaggacctacacacacacacacacacacacacacacacacacacacacacacacacacacaccacccccaccctncaaccaggtgaaaaatccccggcgattagtctataacaaatattgacacgaggggggacaaaagcatgtttgaaatgtattagaatcaagaacctgtacaaaaaaaaaaaattaaaatatncctgaaactgtcaagttcaaaagtctagttaagtcntttctcttgccangagaatgccatcatcagaaggctctgggtcatnaacccaaggngggtgnaa

SEQ ID NO: 271 - DNA, 1834 bp, Homo sapiens
  nbla-11030
ctgtacggaagtgttacttctgctctaaaagctgcggaattcctcgagcactgttggcctactggtggagtcaagctaatagaatattttctgaggaacattattatttgtggaatattttttctaccctcatccatttccttctctgcatttttctttcttactggtctttgtacagattttattcaattttctgttaaagttgtaatagtatgcataagacctgtggcattgagtacttttttaaaatcccacatagagtcaaaaatcccaattacttgcatttgttagttgctgagaagacagaccttataaagagctgaattggttaaagtccagagcaccaattcatgatgttgtgaccaatttacaaagacattcagacacagctggataccatagacaaagatgaaattatgataatgctgttcaaaattaacggtccataactatcaaaggcaggtgcaaggcaaattgaatttggatattgatgaggctgaaatgggatagttcatacagggaccttggatttatactgttgcttttttatggccatgttaaaagcatctactttccccatgggaggaaggtgcatgctgagtgatcctgttgagctgtcactgctctgtcaggagattcttgttgatggacatatgtctgaccacttgagaattgtgttggagtgaaatacacttgcataagtcaattattaatgacagttcctttagcaactcccagagaaggtggggcatgacttcttccctggagctgacttcagacaaattcacagatgctaaaccctggcttttttttttttaacattttaatttcctctcatagaatcatcacaaaataagaaaacacttctttatatcgtaatcataattccagtgttttcagttttgtttcctttttccactaaaatcattcctgtgtttcaatcagtaaagtgggcttcttgatttcatttgggatttgtatttgtgtttttgttttccattcgtttatgtttctttgaaaggcgctgtgaaacgcctgcaggtatggtgctagccaagtgatctctagagacctagattccaaaaatccaagccattgtccatctgaatgctataaacttcatggacatgccctcacctcatgagtgtccagtgcctctcagatgcaccctgtatatttactgttcatcgtggaactcgtgccactgaaaatttttaagtgactatattcaaaaacagcaggttgcatgacagtttctcagtgaagaggttcaaaaaaggtgagatgctattgctttgtgaatttacaaaggaaagaataatttaactgctcagaattacatgtccggtcactgctttttaatttaaaaaataatagagcatcattagtaatcttgttttctctttgatacataggtaaagggtgttttgtgtctggatgcctaaggtgattccaggggaggggatggaagatatgtgacatcttccctgaaatttatattgatatgcaatgctttgtcatttaaaacctaagctaatgttttctacaatccataactctgagtttatctttttggaaacatagaaggggatgacattgaagatgaaatggatacagcaattgctgaatgacagtttgcccaaattagtgcagttaaaatatgctgacgcccctgcatggccaggaagacttctgctccatgcacacaagcaccaagtatcaagcgaccaccaacacgttcccattcctttaggcctccatagctttgcttttgctttctgtttcctgaactaaaaaaaaaaaaaaaaaaaggccacatgtgctcgagctgcag

SEQ ID NO: 272 - DNA, 1871 bp, Homo sapiens
  nbla-11042
gcctgtacggaagtgttacttctgctctaaaagctgcggaattcctcgagcactgttggcctactggttcaaaagaactgctgcccagtgactccgtgctgcacggaagaatatcagctccagaaacagaaaagatagtcctagaggcaggaaatggattaccatcctggaaattcaatgaccagctttttccctgtgacgtgtgtgggaaagtgtttggccgacagcagacattgtcccgacacctctcgctgcacacagaggaaagaaaatacaaatgccacttgtgcccctatgctgctaagtgccgtgcaaatctgaaccagcacttgaccgtccattccgtgaagctggtgagtacagacaccgaggacattgtcagcgccgtcacctctgaaggcagtgatgggaagaaacatccttattattacagttgtcacgtgtgtggatttgagaccgagctcaatgtccagtttgtcagccacatgtcactccacgtggacaaggagcagtggatgttttcgatctgctgcactgcctgcgacttcgtcaccatggaggaagcagagataaagactcacattggcaccaagcacacaggggaagacaggaagacccccagcgaatcaaatagcccctcttcatcctccctctcagctctgagtgattcagccaacagcaaagatgattcagatggctcccagaaaaacaagggcgggaacaatctgctggtcatctctgtcatgcctgggagccagccctcactgaacagtgaggaaaagccagaaaaagggttcaaatgtgttttttgcaactttgtctgcaagacgaagaacatgtttgagcgtcatctgcagatacacctcatcacccggatgtttgagtgtgatgtgtgccacaagttcatgaagacccccgaacagctgctggagcataagaaatgccacactgtccccaccggtgggctcaagtgcccattctgcatttattccaccaaccgccccgctgccatggagtgccacctcaagacccactacaagatggagtacaagtgccggatctgccagacggtgaaggccaaccagctggagctggagacgcacacccgggagcaccgcctgggcaaccactacaagtgcgaccagtgcggctacctgtccaagaccgccaacaagctcatcgagcacgtgcgcgtccacaccggggagcggcccttccactgtgaccagtgcagctacagctgcaagcgcaaggacaatctcaacctgcacaagaagctgaagcacgccccacgccagaccttcagctgcgaagagtgcctgttcaagaccacacaccctttcgtcttcagccgccacgtcaagaagcaccagagtggggactgccccgaggaggacaagaagggcctgtgtccagcccccaaggaaccggccggcccgggggccccgctcctggtggtcgggagctcccggaatctcctgtctcccctgtcagttatgtctgcctcccaggctctgcagaccgtggccctgtcggcagcccacggcagcagctcagagcccaacctggcactcaaggctttggccttcaacggctcccctttgcgctttgacaagtaccggaactcagattttgcccatctcattcccttgacaatgttataccccaagaaccacttggatctcacattccaccctccccgacctcagactgcgcctcccagcatcccctcacccaaacactccttcctggcctatctcggactgagagaaagagcagagactgtctgagggcagccatgttctgtaccaaaaacagagagacaaaagacaaaaaaaaaaaaaaaaaggccacatgtgctcgagctgcag

SEQ ID NO: 273 - DNA, 2169 bp, Homo sapiens
  nbla-11051
ctgtacggaagtgttacttctgctctaaaagctgcggaattcctcgagcactgttggcctactgggtcttaaatttgttaagctaaatatatgttggttctttttattttggaatcctttaagcatcttaaacattttttttttgaagagaagttacaaataacatttctatcaggtagtacttgtatgaaaccacctttcttattctataattttgatttttcaattttatatacttaatatactcactgtcttactatcagaaagttattttgaccaagatttttattatcttcatagattcagaaagagatgctaattctgtaccaatgtcttcctggttactattctcttccctctaatatatactggccatttgtaaaaccattgtgttgttgggatcacttagttatactatacgcagatagagcatctcaactctgtcatagtgttcgctgaacagttttcagtgtcatgcacctttggctgctaattgttcctgacgtgcactcttccgagttggtaaaggcacagtgtgttcatgccagacttctaagagaaacaccagcctcttaaatcagaagcctacacacaacccccttaacaatccaaagaagcttgatggtgtgcaaagaagcatcctgccagccttgtcattgttctgttctatgctaatcctgctgtgttgtctaaaagatggagggaagaggacatcagtgtctgatagtgaaatcatcagcaggaaagtgaagctctttccttggttacagataagacttggtttacactattggccagtatctgctaaacatatgaagacttaactattcagtgttgcctaggcattcgcctgcacaacattttgaggttagaacatagaatattttcagaaatactgttgtagtttgtgagtgttgttcattagttacacattagctatagagtggatgcatgaagccccatgacaccagtaaacttctcttaccagtaggtaaaccaaacaccattctgtcattagcagccctcttaaatgttgcctctccgtatcctgttgcatttttgtgtgcattgtgtttctactgatctctcttaggtttttacggaatcaaaggaaactaatttttccttaatagcaagaaagatgaagaggtaaagggcattgaagcagaaatgtatagtttggggtacgattagaaaactcgtaaggaaaacagaagtcctaatttcaaactgactgctcttcgttaagtgctcttaaggagagtctagtaacagtaacactttctggccatttctagtttagattctcttcgttactgaaacttttgagaaatattacctgtggattaattttgcacaatgttctattctcataatgacttacaaattaaactaggtttttactgaactacctcacactaattttctatgctttcccaagtaagctgttgccctgttggatctttactgagtgaattataaatgtgtgttaaatactttctagccaatgttgacacaataccagtaagtatgtaaagtatataccttacatcagtaagagacacgtgtaaaatctttgactgtatgtcttgcaaaattgtgctcgttgacattattactgtttttgtaagtagaaacctgctcgtgatatcggtccatttacattttacaaaaggagtaaatcttagtaaaaattttacgaagaaataaattacttttgtaggcccaatatttggtatatttttgagaagctgttaatcttttagctgaataatgaagttagactgaattacgtgtctccctggactgtgacatctattttctcattacagtttatcctggtcagcagggtgtcacacctggaaacctgagtatgatagctgacatttgcttttctccctctgcgatgtcattcctcctccattcctctccttccctgtgttccgttccctctcctttcctctagacaaaacaaaatggggcactttttagggaatgctgagaacattattgtggtttttcatcattcatgccctagtcattaaacatgcaccactggaatgtaaacaatgttatctagtatgtcaattggttataatattttaaataaaaaagaaaaaagtggtatgaaaaaaaaaaaaaaaaaggccacatgtgctcgagctgcag

SEQ ID NO: 274 - DNA, 733 bp, Homo sapiens
  misc_feature (2)..(7): n is a, c, g, or t
  misc_feature (14)..(14): n is a, c, g, or t
  misc_feature (17)..(17): n is a, c, g, or t
  misc_feature (19)..(19): n is a, c, g, or t
  misc_feature (25)..(26): n is a, c, g, or t
  misc_feature (134)..(135): n is a, c, g, or t
  misc_feature (595)..(595): n is a, c, g, or t
  misc_feature (659)..(659): n is a, c, g, or t
  misc_feature (706)..(706): n is a, c, g, or t
  nbla-11067-f
gnnnnnngggtggnttntntttganncctttggcactgccggcctacttgaaacacttgtacttctggaaatggactggagactttttaaatttgagtccactattgacatggaaaccccagtggaatcagatnntccctcaaagaccatgatggtatcggactagttttcagacactgcctgttgctgtccatcagcacttggtctcttatcttcagtgagaaggtgacccgccttcttcccatggtggctgcctaaagtgcttcttttctaacccaaaacagttctactcacttccttttacagaattcaccggccattttcctgttacctgatccttctacaggatttttaaaaagtaagagagtttcagagaagccgatcccataatccccagtgcagccagggtttgtgtgtcatcgtactggagtagagggccgactcttcccatgaaggtgagcacagctgtgagtgagtgagctcatatctccatttgtcagtgctggactggtaccagatcgtaaccttcccgttggtcggaaacttttccatctgtcgcctagaaaaagagaaagcttaccatcgagggtgtggntgatccttgaagctgcttggtaaagtatcatttctcaagcttttcttttggactcctatcatgnatcattaatatctaccagtcccttttcattctaagacaaaacatttnttctaaatctctgaataaaatcagggg

SEQ ID NO: 275 - DNA, 736 bp, Homo sapiens
  misc_feature (2)..(3): n is a, c, g, or t
  misc_feature (6)..(12): n is a, c, g, or t
  misc_feature (30)..(31): n is a, c, g, or t
  misc_feature (648)..(648): n is a, c, g, or t
  misc_feature (679)..(679): n is a, c, g, or t
  misc_feature (715)..(715): n is a, c, g, or t
  misc_feature (732)..(732): n is a, c, g, or t
  nbla-11067-r1
gnnggnnnnnnntttgagtgccctttgaanncctttgttactggcgaaactcatctttattaaacttaaacagagaagctacttctgcacatgttaaacacacatggaaccaaacagctcgatggagacaccctgcactgcttatggtgatgctgcaggaatggcggcagcgatgcccgctacactccatggcctgctgcacatgtgacaggacagttatttcatctatgcttacacctgcaggtcccttaccctagaaacactctatatcttcttaggtacttcccttgaaacaggatgagttctagaggaaataaaactgctgcacttacaaacctagaaatattcagggaccaagattagttgttcagtgacctaggaaaccttagaatcctgtaggttcctcaggagaggtgcttccaagtacttgagaacccacaggcagagatgcttccctttccatggtggatgtgtatgtcactccaggacaaactgcggagtcacggagtgtggaacacatctggttgtgtacagtacactatcccagaggaaaatcacaaagcaacacaactctgcagcaaaaactagtcccaaagtcagaagataaaactagcaaaaactttgccaatatttagagaaaagctctanggtgtggaaaagtccgggcttcctttttctncatgcccaagcagagccagtatcattccttaagctntaacaaaaaccctttgnataa

SEQ ID NO: 276 - DNA, 719 bp, Homo sapiens
  misc_feature (3)..(10): n is a, c, g, or t
  misc_feature (13)..(16): n is a, c, g, or t
  misc_feature (19)..(20): n is a, c, g, or t
  misc_feature (28)..(28): n is a, c, g, or t
  misc_feature (534)..(534): n is a, c, g, or t
  nbla-11090-f
ggnnnnnnnntgnnnnccnntttgaganccctcgagcactgttggcctactgggtaaaaagactggctctccaggaggccctggtgtgagtggtggtagccctgcaggtggggctggaggtggaagcagtggtttaccaccatccaccaaaaagtcaggccagaagcctgtcttagatgttcatgcagaactagacagaattacacgaaaaccagttacagtttctcccacaacacctacatctcctacggaaggagaagcttcttgaagataccaaataaagccatttattctgttttctgggataatgtaaacatgcctctgccttttccttcaaaagtggaattagaaagctggagtgcttcttcagatggactaaatttatgtcgtgtgtgtgtgtgtgtgtgtggttacccattttttagaaggagccgtacagaagaaaaattattctacattatgtaggattgctgtttgcattgccattttgcataagaaagtaatttttgattttgaaaatctcaaaacttttanatctgaaatacagccatgtgatcgatcatattctaaaggctatttaaaacatgtaaaaggatttggggaacggcagaaaacatgcagtttgggcatttgactgacttggaaagtctaagcttattttaagttataactattaaaatcatttttaaaaatttggtaagtttgctgacagagaaaaa

SEQ ID NO: 277 - DNA, 715 bp, Homo sapiens
  misc_feature (5)..(9): n is a, c, g, or t
  misc_feature (13)..(13): n is a, c, g, or t
  misc_feature (24)..(24): n is a, c, g, or t
  misc_feature (51)..(51): n is a, c, g, or t
  misc_feature (692)..(692): n is a, c, g, or t
  nbla-11090-r1
gaggnnnnntttntgtgccctttntttttccttttttgaacctgaatgcanagaataaatactttattaactgattacagttgaaagtcacaaacaaaaaagggggtatattaaggcaaagccatatatatatatatatatgtatagacaaatccaaagattgttacttctttacattttaataacctctgcatttttcttttacacatttaggcagtgtgctttcttttctcctcagttaaagcaacaccttggccaatatttctaaatcatattttgatgacaacttacaggatcagtgattgagacaatgactagtgtatcaaacgctatctgatagttttcttagcatattccgtgtgtggtggtacatttattgtggtgtgcaaaatctgacaactgacgatttttctctgtcagcaaaactaacaaatttttaaaaatgattttaatagttataactaaaataagcttagacttccaagtcagtcaaatgcccaaactgcatgttttctgccgttccccaaatccttttacatgttttaaatagcctttagaatatgatccgatcacatggctgtatttcacatctaaaagttttgagattttcaaaatcaaaaattactttcttatgcaaaatggcaatgcaaacagcaatcctacataatgtagaataatttttcttctgtacnggtccttttaaaaaatgggtacc

SEQ ID NO: 278 - DNA, 2961 bp, Homo sapiens
  nbla-11110
ctgtacggaagtgttacttctgctctaaaagctgcggaattcctcgagcactgttggcctactggagttgcagggtcctttttggaagctcttgccgtcatcgctgacttgggcaatggggccggtggggtttgggggcggaagagaccctcggggttgagaagtatgtggtggcctttcgtcccctgtaaaacattgtcacacggtgtggggcggcagcgctggatctttgcaagttaagtaggcgctggcgttgtttacttgtcaccttctctgtatgttttttccctcattttccctacccttggggctagtgagtctccaacctctgtgcccattgtgtgattctgccttgatgacgtgagttgctcgttctgacttccaggtgtcacattctcttctaatctttttttgattggtgtagatacctgtggagggcggagctgtagccctctttattaccagtatcggagtatatactactacctgtctgacctcaggtgctttcttttccaacgatcttatttctgcatattcagtgagcaaagtgtagatagaaatgtctcagagtggcctggctattacttccctgttcatattaaaaccctttggtttatttgggagttcaatttatttcctttcataacttctctaccttctcaaatcttctcttttctcatcgtccgaggctgtagttactttctgttctcacgtattttgacctttttgcattgcaaaacaaaaacctccagttctggaaatcaggcttgtttggttttactttaattgtcagatccagttggtgtctggtacctatgtagtatgttctagtagatttttgcagtagagactaaaaaaagaaaataaaagaaaagaatggtgtgaaaatttaagaaaaggatcctcttgttactgccatcactgtcacagataaaaacactgcctttaccctggaacatgttagtcctctcttggaggaaatgaaaccctaaaggttgactgtggtctctgcagccacccagtcctgtatttggagagccccctggcttttccagtccatcagatttagtttgtttagaaaaaaataaataagcatgtaatgtatgaaagttacgtgagactatcttggcagttataaattaataaacatttacggtacagaagtggtgtgaattgtaagaggatgtaaaccaaacaaaatacggctttaaagagggcctgaagataagtgagaaaactgaaattcttgaaacatgtattttatggaccgaaagccaaagtgtgactataaataaagcaggacttaagagaatagacaacaatattggaagaaaatgagaattgtggtagagtttggatagatgaagaagagaggccatttaagttggcaatattacagcaaggacaaataaaatcagaattgaatgttgtcgtggataaaagcattaggaagaaggacttttgtttaaatttctgcaaatctctttaaatcctggtttattagaagaaaggctggtttcttttgttgtcttctacattcagtcttttggggtatgttattttagtcgaagtgtatggagaaaatacagctgcaatgataggtagtcagaaacagaggagcgtttttcagataattgtggatgttttttgacactacaccaaagctcaacaagtggaagattcatgtcagctgcaaggtggaatctgaaaccctatcaatgagcatttcattcattgttacattaaaatccattagcccatcttgcactttgaaaggctcttttacccatgcatggttttataacatgatgccatggccacttagaaaatgttggtttactgagttatgcacatcttttaaatatggatacgtttcattacacaatatcaaaatatcacatttcattaaattacaactgatcttgtcagaaatgtctctgaaaattctaagtattgaagagttgtcaagctcatacttgtggatgtaagtctttcaaaatccaattttcatttgaaagtttgactcataattatcattggtatcaaatactgtcagtttttctttaagtgatagattccctttgttcatttgacaaaatctgccaaaaagcgaagtctgaataaccagtttgacaattgttctttcaagtaaaaatggtgttccttgaagagtggttggtttagcttttaactctaaacttttcctggagatagccatcacatcttggtatgcagcaggactttatgtatgcatgcttcatattttaccccacaaagtattaaaaagagtcaagggttgaatttcaataaaatgaatttatgctgctttgtgaagcacagtcttaatttaaattgtccctttttgaacttgtggtgaagaatacaatgattactggtgcagtttggtgccactgtcttgattcatgctaatgcaccagtagttttacccactgtggctatgaaccatgagtgcaaatgtcagcacagtgaaaaaggcaaatagcatcttagtatttattatgagaatagttttcaacttctgaatctccagaaaggattctggggactaccagggcctagggatttcacacttggagaacttctgccaatcatctactaaatattcaggacatgggccaggtgtggtggctcacacctgtaatcccagcactttgggaggctgaggcaggtggatcagttgagctcaggagttgagaccagcctgggcagcatggcaaagccccattcctactaaaaatacaaaaaattagccgggcgaggtggcaaatgcctgaggttccagctactcagaaggctgaggtgggaggattgcttgagcccaggaggtggtttgtggaggcagttgcagcaagctctgatagtgcctgggcaacagagggaaacttcgtctcaaaaaaaaaaaaaaaaaaaaaaaaaaggccacatgtgctcgagctgcag

SEQ ID NO: 279 - DNA, 701 bp, Homo sapiens
  misc_feature (2)..(2): n is a, c, g, or t
  misc_feature (4)..(6): n is a, c, g, or t
  misc_feature (8)..(8): n is a, c, g, or t
  misc_feature (10)..(12): n is a, c, g, or t
  misc_feature (19)..(19): n is a, c, g, or t
  misc_feature (22)..(24): n is a, c, g, or t
  misc_feature (30)..(31): n is a, c, g, or t
  misc_feature (45)..(45): n is a, c, g, or t
  misc_feature (635)..(635): n is a, c, g, or t
  misc_feature (639)..(639): n is a, c, g, or t
  nbla-11176-f
tngnnngntnnngtggggntcnnnttgaannccttgggcactgtnggcctactggggaaaggagtgttcgttctacccagggtaccacagttccccacagtcaaaacccaaaagcaaggagatgagttgaaagacagtttttctttaagtcatcagtatgggatgtcagcagaacaaaaattaaaaagattaattttccttttgatctaaaacttccttagtttgagcagtaggtgctacaaaattatttacatatcttagtatcatagttaaatgtaatgtgtttaggagaggaaaacaaaagatacatttgctttaaattcattaagaaattttcaaattcactttgtagcccatgctgatagaattgggctgtgttggtacatttgaaacactgtttatgttgcttgaaacacttatttatttaatcgccgatgtgatgatgcctatggccgagatcaaatatagctagattggctagactacttatttgtttacttaaactatgggaagaagcatattattgtgtcattctgttgtgtgtgtatgtgtatatacaatataaatatatatatataaagttattttttctttgggttaatttattataagttgtaacacttggctagttttgnttgnatatgtcttaaaatgttttcttatgatatttaagtgacagttaaagaggtatcaaggtaact

SEQ ID NO: 280 - DNA, 704 bp, Homo sapiens
  misc_feature (2)..(2): n is a, c, g, or t
  misc_feature (16)..(18): n is a, c, g, or t
  misc_feature (34)..(35): n is a, c, g, or t
  misc_feature (596)..(596): n is a, c, g, or t
  misc_feature (642)..(642): n is a, c, g, or t
  misc_feature (665)..(665): n is a, c, g, or t
  misc_feature (670)..(670): n is a, c, g, or t
  nbla-11176-r1
gnagttggtggggttnnnttgatggccttgttgnnccctttctacacactttcatttattgtctggacagataaagtacaaataattcaaacacaacaagattatgaaaaaaaaacatttacaatactttcccttggaaatcatctaaactagcaagattaacatgaagtcattcattaataactaaagtatacaactgcctggtcctaagattttttttcctttttttttcccccaagattgaacacattatagagaagattttggcatgcctttcccactaatgcttagcaaatgcatcaaaactttgccagcaaactacgttcattcatagcaggtgacgtaaaaagctttccctgaatgttgaacgagtgttctctgaactgaaatctggtgttatatccaaaaccgaaaagaggaaaaaaaaacagaaaaaaaatttaaaggaggagtctatgatgcagccttggtattcgttatctgtctaccactacaacgactactacaaagtttgccttttcagtgtgaaaacaacagtcctgtctacatgcacttagtgggttcagcatgggaaaaaatgcacaaaataagcacangttataaataaccataacgttttattaccattaagactaaacttgnattgaaaagattttatataacangacangaaaagcaatagcaaatttaactatcaactagat

SEQ ID NO: 281 - DNA, 2035 bp, Homo sapiens
  nbla-11189
ttctaggcctgtacggaagtgttacttctgctctaaaagctgcggaattcctcgagcactgttggccgggtggtgcttgggtggtcgccaccaagaagactttggtggggtagtctcggggcagctcagcggcccgctgtgcccgtttctggcctcgctcgcagcttgcacgtcgagactcgtaggccgcaccgtagggcgagcgtgcgggtcgccgccgcggccgcctcggggtctgggcccagccgcagcctcttctaccgcggccggttgggagtcgccgcgagatgcagcctccgggcccgcccccggcctatgcccccactaacggggacttcacctttgtctcctcagcagacgcggaagatctcagtggttcaatagcatccccagatgtcaaattaaatcttggtggagattttatcaaagaatctacagctactacatttctgagacaaagaggttatggctggcttctggaagttgaagatgatgatcctgaagataacaagccactcttagaagaattggacattgatctaaaggatatttactacaaaatccgatgtgttttgatgccaatgccatcacttggttttaatagacaagtggtgagagacaatcctgacttttggggtcctctggctgttgttcttttcttttccatgatatcattatatggacagtttagggtggtctcatggattataaccatttggatatttggttcactaacaattttcttactggccagagttcttggtggagaagttgcatatggccaagtccttggagttataggatattcattacttcctctcattgtaatagcccctgtacttttggtggttggatcatttgaagtggtgtctacacttataaaactgtttggtgtgttttgggctgcctacagtgctgcttcattgttagtgggtgaagaattcaagaccaaaaagcctcttctgatttatccaatctttttattatacatttattttttgtcgttatatactggtgtgtgatccaagttatacatgaatagaaaaagatggtgttaaatttgtgtgtaggctgggaattcttgctgaaggaattggagaaaacctgttgctgcaaaattttacatgttccagatggaaagggaagtctaagcgctttttaaaacaatttttttttgtatttaattaagcaattgcagttatctgggatttttgggtcagaattttaaattctgtttgattctccatattccagtgaataaaatacaaaagcattgtgtttttaagattgtgtcgatattcacctaaaaacttgtgccaaaagcacctggattggtaattatatttcacttaaagggtaaatttgacaatatcttgataatcaaaagtgcaatttttttcttcaaaatgttttctccagcatcacagatcctgcagatatatatttatatttatacatatatatttatgaaataattcttactcacaaaatatatttctgataaacattaagatattaaatctgatgcacaaactttaatttggccattaatcttttttatttaaaaatttaaatttgtttttaaaattgtatatagtttttaaaatctcacacatgcttcgatacttccttgttaagaattcttaataactactaaaactgatttttaatagttgctgatatatatttggtttgtttgggtatacttttcaaaaccatttttgaatgtccaaacatctgatttaaagtttctgtttatctttctgaccaaaggagcaagaggtataatggatatggcattcattaaaatctttactatgtacaaaaacagtaatatttacagcatcagtaaatatttttaagtggtacttctaaatcataaaagttggggaaagagacctttaaaatcttgtggtgttgaacaatgttatatgaagtagaaaaaataaaatacttcccagttgtgtgttttgttttacaaaaaaaaaaaaaaaaaggccacatgtgctcgagctgcaggtcgcggccgctagac

SEQ ID NO: 282 - DNA, 726 bp, Homo sapiens
  misc_feature (2)..(2): n is a, c, g, or t
  misc_feature (6)..(10): n is a, c, g, or t
  misc_feature (16)..(16): n is a, c, g, or t
  misc_feature (19)..(21): n is a, c, g, or t
  misc_feature (26)..(27): n is a, c, g, or t
  misc_feature (30)..(30): n is a, c, g, or t
  misc_feature (39)..(39): n is a, c, g, or t
  misc_feature (670)..(670): n is a, c, g, or t
  misc_feature (706)..(706): n is a, c, g, or t
  misc_feature (726)..(726): n is a, c, g, or t
  nbla-11201-f
gngggnnnnngtgggntcnnnttgannccnttggcctgntggcctactggaggttggacatccaacaagatagactctaattcagcctccccagtctctggccacccagctcactcagggattcagctacccttggctacccaagtagtctaaacattttatctttatcaggcacatatacagtctggttctctgtagccaaatttagatacccatgacatttatctaatgatttcaaaccaaacaggttcctaaaaaaacattcagcctacttctagaacttccccattttgcttggctgtgaaaatgtatttgtcccatgcaggcccttgctccagcccagtggaagcattagtacctcttcctagcgggaactcagtccagctacacaccagagccaggccagtggttgtctgggaaatcttcaaaggccgtgaccactcagcaagggtcagtggcacctctccccactgtctcctcaccaggtgcattcatcccatccatccatgcattcactcacccttcgtgttgtccagcactatgtatagtgctgcagaaacaagaaggatatagtgcttgccttcaaagacctccaaagtggggagatagtctggatgacaggtgctgtaatagaagtgtgcccccggatgctataggagcacagaaaganggcaactgatgaacactggggtgaaaagtggaagangagacctgggaagactcctn

SEQ ID NO: 283 - DNA, 727 bp, Homo sapiens
  misc_feature (2)..(2): n is a, c, g, or t
  misc_feature (7)..(7): n is a, c, g, or t
  misc_feature (9)..(9): n is a, c, g, or t
  misc_feature (21)..(21): n is a, c, g, or t
  misc_feature (27)..(29): n is a, c, g, or t
  misc_feature (31)..(31): n is a, c, g, or t
  misc_feature (697)..(697): n is a, c, g, or t
  misc_feature (699)..(699): n is a, c, g, or t
  misc_feature (704)..(704): n is a, c, g, or t
  misc_feature (714)..(714): n is a, c, g, or t
  nbla-11201-r1
gnggggngngtggggggcctnttggannncnttttcaagacaggagtgcagtggcacgatctcagctcaccacaacctctgcctcccaggagaatcaagtgattctcctctctcagcctcccgagtagctgggattacaggcacatgccactaccgcccagctaatttatgtatttttagtagagacggggtttcaccacgttggccagctggtctcaaactcctgggctcaagcaatccgcccgcctcagcctcccaaagtgctgggattacaggcgtgagccaccacgcccagccaaggttcttccttaaatgccgatgctctctgaagtttcagcttcagcccttgcatctttctggtgggattgctactcagggcttcaagggtcgcccctaggagtgactccaaggtggatctctccatctctgccttgcctatttccagccagctgtactccttctcctggggaacgacaggctctccatgctcaacacagtaactgctctcctctgaccacaccgagatcaacttctattccatcttccatgtccagcagactggagagtctgggagtcaatctcgaatcttctcttactccttactttattaaggcactgggacctatagctttcacttctttaatatctcatattggggttccttccttttcaacttatcctacagacactttacttnangcttngccattctgncctgaatcaaata

SEQ ID NO: 284 - DNA, 704 bp, Homo sapiens
  misc_feature (553)..(553): n is a, c, g, or t
  misc_feature (701)..(701): n is a, c, g, or t
  nbla-11212-f
gatccctcggcactgttggcctactggttcttccttctcctctacccctccttcccccctccccattagagtagtgtggagataaggctggactggtctatcagattgaactccaagaatgatcacacaaaatgtttagggagatgttccccgtggtgtatcctcatggtaacaacgacaaaaaatgccggttgtctttgttctcttttcactattcctaacatgtgtacatgatagctttgattctgcaagtaaaagtaaatcctgtgttgtgactggtgctttcatatatttgtgacaatttttgagtaatattgcatgaaaatgtccctatgttacatccattcagaagttttgttgttttactctaaagctgggaaaggaaatgagagggaaaagaccccggagagggaagaaaatctcagtattttgaaaattgagattacttcagagccttagccacacctaaaatacctcctagttaatagtggtataaatgcctcttcaatacgttttccagaatccaaagcattttggtttatccaggacccanggcagcacagctgtcaccaagcaggagagttaaggattcaccatgagctgggaaatgctttggcatgagtatgagcaaattccctctttcctgaatcatggacattctagattaaaagaacatttttgggctcttaacaagaaaaccntgg

SEQ ID NO: 285 - DNA, 720 bp, Homo sapiens
  misc_feature (100)..(100): n is a, c, g, or t
  misc_feature (560)..(560): n is a, c, g, or t
  misc_feature (565)..(565): n is a, c, g, or t
  misc_feature (688)..(688): n is a, c, g, or t
  misc_feature (693)..(693): n is a, c, g, or t
  misc_feature (704)..(704): n is a, c, g, or t
  misc_feature (706)..(706): n is a, c, g, or t
  nbla-11234-f
tgttggcctactggtgtggtcctaagacctggagaggacaggctaagtgaagtgtggtccctggagcctacaagtggtctgggttagaggcgagcctggnaggcagcacagactgaactcagaggtagacaggtcaccttactacctcctccctcgtggcagggctcaaactgaaagagtgtgggttctaagtacaggcattcaaggctgggggaaggaaagctacgccatccttccttagccagagagggagaaccagccagatgatagtagttaaactgctaagcttgggcccaggaggctttgagaaagccttctctgtgtactctggagatagatggagaagtgttttcagattcctgggaacagacaccagtgctccagctcctccaaagttctggcttagcagctgcaggcaagcgttatgctgctattgaagaagcattaggggtatgcctggcaggtgtgagcatcctggctcgctggatttgtgggtgttttcaggccttccattccccatagaggcaaggcccaatggccagtggtgcttatcgcttcanggtangttggcacaggcttggactagagaggagaaagattggtgtaatctgctttcctgtctgtagtgcctgctgtttggaaagggtgagttagaatatgttccaagggtggtgaagggctaaaatgnacgcntttaaggttgnancccctgtgcaaggg

SEQ ID NO: 286 - DNA, 758 bp, Homo sapiens
  misc_feature (2)..(2): n is a, c, g, or t
  misc_feature (4)..(4): n is a, c, g, or t
  misc_feature (8)..(12): n is a, c, g, or t
  misc_feature (16)..(18): n is a, c, g, or t
  misc_feature (21)..(21): n is a, c, g, or t
  misc_feature (23)..(24): n is a, c, g, or t
  misc_feature (27)..(29): n is a, c, g, or t
  misc_feature (32)..(33): n is a, c, g, or t
  misc_feature (599)..(599): n is a, c, g, or t
  misc_feature (637)..(637): n is a, c, g, or t
  misc_feature (669)..(669): n is a, c, g, or t
  misc_feature (683)..(683): n is a, c, g, or t
  misc_feature (707)..(707): n is a, c, g, or t
  misc_feature (714)..(714): n is a, c, g, or t
  misc_feature (719)..(719): n is a, c, g, or t
  misc_feature (731)..(731): n is a, c, g, or t
  misc_feature (736)..(736): n is a, c, g, or t
  misc_feature (747)..(747): n is a, c, g, or t
  misc_feature (751)..(751): n is a, c, g, or t
  misc_feature (754)..(754): n is a, c, g, or t
  nbla-11234-r1
gngngggnnnnnttgnnnccntnnttnnnccnntttggattctaacactttattaagaggtcacaagccacaggactttaaagtgcatgaaatttattggcaatgaagccgcatgtataccaggctcccctagtccccaccaccttgccccatccatcatgacgtggtggggaggggttgagacccatctttaaaagtgggggacagcagggacaaaggatgggaaactggaggaacaggagtattcatgaactgaagctgggacaggagactgaccacagtgattctgctcactgaaggaagggtggggtcagtctagtctctcaaaggctggtgaaaagttttttttcacctattcctcacagcgagcccctggcatttcaaatagacctaactcctcctcttcatctttctctggttttctcctctatgagtaatttggaacccacagtccagcttgagggtatccctgatatgcacaatgaatacaaaccacggcggatgcagatttcaggatcatgctggggcctggcccatttgggtgggaggagctttctgtcaggagttgctgggtgcggggtaccgtgtgtgcccttcantgtggtgaagtgagaacatgtgaatgtgtgtgcatgtnccatccaaaccgtaagaggcaacttgggtcangaggaccccacttnttcctttatgggacaacagtggantgggaanaaacnggggcttttgantccanaaagaaagganaggnctncttc

SEQ ID NO: 287 - DNA, 714 bp, Homo sapiens
  misc_feature (378)..(378): n is a, c, g, or t
  misc_feature (482)..(482): n is a, c, g, or t
  misc_feature (589)..(589): n is a, c, g, or t
  misc_feature (652)..(652): n is a, c, g, or t
  nbla-11269-f
gtggcctactggagcatcctccttgctagacatggacatgacatttttaaaggaattatctggttacagcgttttaagcaaactgttctaaggagtctgtacattgcattattttttctattctttttttcttttgcatatatgtaattctggaggtaaagaaaaagcctgccagggattcagaaggcatcccactagcgatcagctgacattcctaactgaaggctgcaatgtgttgcttattcattttgtaccgtgggagctgcggggactagcagagagctaaactatgcatttcaaacagcagtgcttgtgcagaaagaggggtgagagagaggcagccggcgaggaaagagcacagctggactttctccttgnttttatccatttctgcaggatcatgtattcataagggatgaggcgggccacggcgatcccaggcctgagccgcggctacccagtcagttcagagccaggccctncactaccggaacagagagcgctttgcacgatcaaatcagcatctttggttacacgacagatccatgagcatgagcaggagaacgaagttgcgggaacaagatgtcanggtataagccggatgccgcggccagcaccagaagcagctgatcgcctggagaacaagctgaangctgagatggacgaacaccggcttcaagctacagaaggaggtggagacgcatgccaacaact

SEQ ID NO: 288 - DNA, 715 bp, Homo sapiens
  misc_feature (92)..(92): n is a, c, g, or t
  misc_feature (102)..(102): n is a, c, g, or t
  misc_feature (464)..(464): n is a, c, g, or t
  misc_feature (527)..(527): n is a, c, g, or t
  misc_feature (554)..(554): n is a, c, g, or t
  misc_feature (571)..(571): n is a, c, g, or t
  misc_feature (606)..(606): n is a, c, g, or t
  misc_feature (629)..(629): n is a, c, g, or t
  misc_feature (639)..(640): n is a, c, g, or t
  misc_feature (652)..(652): n is a, c, g, or t
  misc_feature (660)..(660): n is a, c, g, or t
  misc_feature (671)..(672): n is a, c, g, or t
  misc_feature (688)..(689): n is a, c, g, or t
  misc_feature (695)..(695): n is a, c, g, or t
  misc_feature (713)..(713): n is a, c, g, or t
  nbla-11269-r1
gaaatggcaaaaaatttaatctcatctgtagtcctccttaggaaaatctaatgtaaccaaattcccaaatcccattctgaggctctccatgncaaaagtttnaatctctcgctcttgcctttccaataggttctttattctctcgctgcgttccttccgaagggcagccagctcctcttcaatcttctgctcaaggtgtgctctgcgcagagacactctctgctctagcttctggagctcacgttcatgttgtgcctctgtttgcatcttgattttgctctggtaggccgttgagcagctccatttcctgctggagctgtagcctcaaggcctggcattctgcttcttgagcctcatctagccgtaacgcttgagaggccatcatttcatttatactctgtcatactgctctgcaaaatggcaagttttcttgtctgctcatctttcagtgtctttaagattgntttgtgctcattctttggagtaacttccaactggtgattcttgagtgctttatactggttggnctggactttgcaagtgcctgaaactgntttttaatttgcatttncatggccttaagctttttggctgttgccgaaagtncatgacatgcctttctgtgcagntctctttttnngcctcttattgnacttcaanctggttttccnnttccgctgggtgctgnnaaaccngatcacaatccatgctancc

SEQ ID NO: 289 - DNA, 746 bp, Homo sapiens
  misc_feature (2)..(3): n is a, c, g, or t
  misc_feature (5)..(7): n is a, c, g, or t
  misc_feature (14)..(14): n is a, c, g, or t
  misc_feature (17)..(20): n is a, c, g, or t
  misc_feature (26)..(27): n is a, c, g, or t
  misc_feature (137)..(137): n is a, c, g, or t
  misc_feature (580)..(580): n is a, c, g, or t
  misc_feature (689)..(689): n is a, c, g, or t
  misc_feature (712)..(712): n is a, c, g, or t
  misc_feature (721)..(721): n is a, c, g, or t
  nbla-11270-f
gnngnnnggggggnttnnnnttgaanncctttggcactgccggcctactggagatctgcttctccccggctcggggcgccgaggcggcgtccgggaggtgtcttctgcaaaggttgcctggcgctgtccaacatggnggaggcaccggcagcgggcgttacctgcgagcgggactaacccctgcctggcgttccgggcggcagtgcctggtccagagtccagggactcggctgcctgcgcgccccgaggcggaccccggctctgactgctcccctggccgcgggcttctcgactgggacgcggcgcgaggagggagcgcggcggccccgagtctccctgagccatgggcaacgaggcgagcttggaaggggaagggctccccgaagggctggcggcggccgcagcggctggaggaggagctagcggggcggggagcccctctacaccgcgatcccggccggcatggaggcggatttgagccagctgagcgaagaggagaggagacagatcgccgctgtcatgtcaagggcgcaggggctgcccaagggaagcgtcccccggccgctgcggagtcgccttncatgcacaggcatgcacagcatgatgtatatgtccgggcatatatgtacagcttccgtgcacatatgtgccaacctgtatgtgccaacacggcggtacatatatgtcgnctccgtcatttattcttccccantggggtggncataagagatcctaagcttgtgatg

SEQ ID NO: 290 - DNA, 761 bp, Homo sapiens
  misc_feature (2)..(3): n is a, c, g, or t
  misc_feature (5)..(6): n is a, c, g, or t
  misc_feature (8)..(8): n is a, c, g, or t
  misc_feature (10)..(14): n is a, c, g, or t
  misc_feature (18)..(21): n is a, c, g, or t
  misc_feature (27)..(27): n is a, c, g, or t
  misc_feature (30)..(35): n is a, c, g, or t
  misc_feature (37)..(37): n is a, c, g, or t
  misc_feature (597)..(597): n is a, c, g, or t
  misc_feature (664)..(664): n is a, c, g, or t
  misc_feature (681)..(681): n is a, c, g, or t
  misc_feature (749)..(749): n is a, c, g, or t
  nbla-11270-r1
gnngnngngnnnnntttnnnngccttnttnnnnnncnttttataaagtggaggataaggatctacacctatatatccaggtctttcgtgcttacagtatctcaaatgaaaaattgtaggtttgccttcagttgtcataaaagaggaattgtttcagaaccacggacagaaaactgttctctactagagggtgcaaagttaaagggtttgtttacagtaagaaaggcaaggcaggcacaatgattatacccctctcagtactctaattagaaaacaactaatctattgggatgaaggaaaatggagagttacaggcggaaatgaaaacattcatattactgattagctcttatacttgcctatgcaagttgccatttatttgctttgtttttaaaagtatgtattgagaattattttctaaggtaataaaattcacatgttcttccctaaactgaaggccacttttgcataaaacagagcagtggcttaaaaatagcatatgctaatttagaaatatatgtacagcacctgctctgctgtgaccaaaccatctgtttaatgcccacatattttagggtcctcaatgaatataaaaggnatattcattctattccttctacctaaacagcttctgctctcctctgggggtggggtggcaaagaaanggcaaatcacccacaanggggattaaagttacagaaatatttagacatcattcacagagaaaaaagacccccaatgggccaaaangtttaaacaaga

SEQ ID NO: 291 - DNA, 731 bp, Homo sapiens
  misc_feature (2)..(2): n is a, c, g, or t
  misc_feature (4)..(5): n is a, c, g, or t
  misc_feature (7)..(7): n is a, c, g, or t
  misc_feature (9)..(9): n is a, c, g, or t
  misc_feature (12)..(12): n is a, c, g, or t
  misc_feature (15)..(15): n is a, c, g, or t
  misc_feature (24)..(25): n is a, c, g, or t
  misc_feature (104)..(104): n is a, c, g, or t
  misc_feature (391)..(391): n is a, c, g, or t
  misc_feature (630)..(630): n is a, c, g, or t
  misc_feature (720)..(720): n is a, c, g, or t
  misc_feature (725)..(725): n is a, c, g, or t
  nbla-11279-f
gngnngngntgnttncatttgaannccttggaacactcctggcctactggcatgtgaaagcactttgaaaattgtaaagcgctatgtaaatgtaaggtattatngaaacatctttaacatatagtttcataccattcattttttaacaaagaaagggaaaagtctgcttgtaagctggttgaaaaagttaatcttgatataaatttgtgtttgataaatatcctctcagtgttttatcttccatgtttcaacaactattgaaatatgaaatgcctgtgaactcttaaagcttcatgagcagctgcttgagttcgggaagttcactgttagaaataggctttgttagctgactagggtcagggaaacttttctcttcaaatttgaaagctgnttctgttttcattttacattattattcagaaatggtagctattctatacctatggttaagtaaatatttctgaataaggcttcaccatactgtaagcattttaggtagattgccttaaaggttatgggagggcatgagggaacacttcttatgagaaaacatttataaacaaaagaaacatttataaactaaagaaaaactaaaagaatgacagaacaatcatcttaacaccctttctnacaataatataaaaatattaaaagaacataggcaggctttttttaaatttggcttttttctttccttttttcaaattgacttttataggnatttnctggaa

SEQ ID NO: 292 - DNA, 734 bp, Homo sapiens
  misc_feature (2)..(2): n is a, c, g, or t
  misc_feature (5)..(5): n is a, c, g, or t
  misc_feature (8)..(12): n is a, c, g, or t
  misc_feature (17)..(19): n is a, c, g, or t
  misc_feature (22)..(22): n is a, c, g, or t
  misc_feature (27)..(27): n is a, c, g, or t
  misc_feature (658)..(658): n is a, c, g, or t
  misc_feature (676)..(676): n is a, c, g, or t
  misc_feature (708)..(708): n is a, c, g, or t
  misc_feature (713)..(713): n is a, c, g, or t
  misc_feature (721)..(721): n is a, c, g, or t
  nbla-11279-r1
gnagnggnnnnnttgannnccnttganttcctttttttttttgggtaaaatcaaaatatattttacttcccattagattttaaaacaatcacaataatttatcaacagttgccatttcacagcaattagaaaagaggagttgatacaagttgaacagaaaggtatcttttcttcttttaggaaatatatatatatatgtatatatatttcacatacacacataacattatctttaaaattccaagtggttacttttgtattataaaaaaattatctccctatggtcaaaatactgaaaaagcgcaaaggctgaaaaaagaaaaccacatttgccactttaaaaaaatacattattgtctcagtggttctatttatttaattgattataaagtattatgactcctagtactgtactggacctgatggaattaaatacacccctttctcagtctccagaaaggatactcctaacccaccctaaaatatgataaaataaatgcccctattctgaactgttaaactgggaaataaaccatgcccacctggaaacaatataagtcataaaagtttatgaatctgtgggagagactacacgaatcagaaagcaattctttggatataagttaggagcttttaagaagtatataaactcttttangcatctagagtagagacnccaagaggatttcttcataaataatgatttanccagngcaatggntggttgccatggc

SEQ ID NO: 293 - DNA, 761 bp, Homo sapiens
  misc_feature (5)..(9): n is a, c, g, or t
  misc_feature (13)..(15): n is a, c, g, or t
  misc_feature (18)..(18): n is a, c, g, or t
  misc_feature (21)..(21): n is a, c, g, or t
  misc_feature (26)..(26): n is a, c, g, or t
  misc_feature (30)..(30): n is a, c, g, or t
  misc_feature (34)..(35): n is a, c, g, or t
  misc_feature (37)..(38): n is a, c, g, or t
  misc_feature (40)..(41): n is a, c, g, or t
  misc_feature (43)..(44): n is a, c, g, or t
  misc_feature (47)..(49): n is a, c, g, or t
  misc_feature (53)..(54): n is a, c, g, or t
  misc_feature (87)..(87): n is a, c, g, or t
  misc_feature (429)..(429): n is a, c, g, or t
  misc_feature (552)..(552): n is a, c, g, or t
  misc_feature (598)..(598): n is a, c, g, or t
  misc_feature (607)..(607): n is a, c, g, or t
  misc_feature (653)..(653): n is a, c, g, or t
  misc_feature (667)..(667): n is a, c, g, or t
  misc_feature (696)..(696): n is a, c, g, or t
  misc_feature (699)..(699): n is a, c, g, or t
  misc_feature (730)..(730): n is a, c, g, or t
  misc_feature (743)..(743): n is a, c, g, or t
  misc_feature (754)..(755): n is a, c, g, or t
  misc_feature (758)..(758): n is a, c, g, or t
  nbla-11307-f
gaggnnnnnttgnnnccnttnttgancccnttgnncnncnncnntgnnngatnnggataagctgctctcattgagtagtacctcagnttcttcatctttaaatgtaagtatctgccttacttacagagtatatgtgaatgtaaagtggggtaattacatgaaagtattctgccaatgcagtgtgattttattaatactagtttccttgtctcacattatgctcatttccatttgtgtatttctgctactgctacctacaattgtcttcttaaattttacataatcaaagtcagtctctgagcttctagctacccacaactgtgcaactcctgtacaactcctcctgcgtgcccacaggtctgttacaagtactcagggttacactggtaactcttctctcagtccctattctgcatgtagtcaaccggnttcctatttagtgtctaatgtcttggtttttttttttttattttcttcattagatttgaaatgacttgatggcaaggaatatatactttatatatggtttatacatttcatacattttctggnatttttataggcctggaatggaccttggagctgaaaaaaatagacnttacttggnattactataagctagggaaatagaaagggttaatcccaatatattnctttataacctggngggtaaccattcctttctggattctgaanagnccctacctttggatacctatactaaccgaanttttcagggcttntgaaccttaannaanatc

SEQ ID NO: 294 - DNA, 751 bp, Homo sapiens
  misc_feature (2)..(2): n is a, c, g, or t
  misc_feature (5)..(5): n is a, c, g, or t
  misc_feature (10)..(12): n is a, c, g, or t
  misc_feature (16)..(16): n is a, c, g, or t
  misc_feature (24)..(25): n is a, c, g, or t
  misc_feature (27)..(29): n is a, c, g, or t
  misc_feature (38)..(38): n is a, c, g, or t
  misc_feature (370)..(370): n is a, c, g, or t
  misc_feature (534)..(534): n is a, c, g, or t
  misc_feature (568)..(568): n is a, c, g, or t
  misc_feature (584)..(584): n is a, c, g, or t
  misc_feature (587)..(587): n is a, c, g, or t
  misc_feature (601)..(601): n is a, c, g, or t
  misc_feature (612)..(612): n is a, c, g, or t
  misc_feature (615)..(615): n is a, c, g, or t
  misc_feature (624)..(624): n is a, c, g, or t
  misc_feature (634)..(634): n is a, c, g, or t
  misc_feature (671)..(671): n is a, c, g, or t
  misc_feature (701)..(701): n is a, c, g, or t
  misc_feature (706)..(706): n is a, c, g, or t
  misc_feature (717)..(718): n is a, c, g, or t
  misc_feature (737)..(737): n is a, c, g, or t
  nbla-11307-r1
gnagngggtnnnttgngtgccttnntnnncctttttgntttttttgagacggagttttgctcttgttgcccaggctgaagggcaatggcacgatctcagctcaccgcaacctctgcctcccgggttcaagcaattctcctgcctcagcctcctgagtagctgggattacagacatgcaccaccacacctggctaattttgtatttttagtagagacggggtttctccatgttggtcaggctggtctcgaactcctgacctcaggtggtccacccgcctcggcctcccaaagtgctgggattacaggtgtgagccaccacaagactgagtttatctatctgtttcatctctttgatttgtatttgtgtggntttacgtaggaggcagtgatatggcgagtataaggtagaagaaggcataactgtgagagtggatatggtatgcaatgcatacagaagagtcatgaatggctacactagaataaaacacctaccaagatatgccatgctaaaaagctgggaagtctatcaggaangcaacagaaaacagtggacagacattcaaatggntgcatataagcatttnctntcagttaaaaagcnccactttaaangcnggaaatccngacctaaatnccacttggtactactttttggttaaagcacaagcttnttaaaactcctaaaattattggataactgnaaaanagggtaattgnncccttttaaaacttggttnaacttaaaaaaaaa

SEQ ID NO: 295 - DNA, 735 bp, Homo sapiens
  misc_feature (2)..(9): n is a, c, g, or t
  misc_feature (11)..(11): n is a, c, g, or t
  misc_feature (13)..(16): n is a, c, g, or t
  misc_feature (19)..(20): n is a, c, g, or t
  misc_feature (22)..(22): n is a, c, g, or t
  misc_feature (27)..(27): n is a, c, g, or t
  misc_feature (30)..(30): n is a, c, g, or t
  misc_feature (33)..(33): n is a, c, g, or t
  misc_feature (40)..(40): n is a, c, g, or t
  misc_feature (512)..(512): n is a, c, g, or t
  misc_feature (537)..(537): n is a, c, g, or t
  misc_feature (590)..(590): n is a, c, g, or t
  misc_feature (618)..(618): n is a, c, g, or t
  misc_feature (636)..(636): n is a, c, g, or t
  misc_feature (667)..(667): n is a, c, g, or t
  nbla-11378-f
gnnnnnnnngngnnnntgnngnttgtnttnganaccttgngcctgctggcctactggtataaagtggtggcaagatagggaagggataatctgagaatttttaaaagatgatttaatgagaagaagcacaattttgattttgatgagtcactttctgtaaacaatcttggtctatctttacccttataccttatctgtaatttaccatttattgtatttgcaaagctagtatggtttttaatcacagtaaatcctttgtattccagactttagggcagagccctgagggagtattattttacataacccgtcctagagtaacattttaggcaacattcttcattgcaagtaaaagatccataagtggcattttacacggctgcgagtattgttatatctaatcctattttaaaagatttttggtaatatgaagcttgaatactggtaacagtgatgcaatatacgcaagctgcacaacctgtatattgtatgcattgctgcgtggaggctgnttatttcaacctttttaaaaattgngttttttagtaaaatggcttattttttcccaaaggtggaatttagcattttgnaatgatgaatataaaaatacctgtcatncccagatcatttaaaagntaactaaagtgagaatgaaaaaacaaaattncaagacctttttaaaagaatggctggcctacacacttttatggattggttttcttacatcccatcttt

SEQ ID NO: 296 - DNA, 737 bp, Homo sapiens
  misc_feature (3)..(3): n is a, c, g, or t
  misc_feature (6)..(7): n is a, c, g, or t
  misc_feature (12)..(12): n is a, c, g, or t
  misc_feature (15)..(15): n is a, c, g, or t
  misc_feature (23)..(23): n is a, c, g, or t
  misc_feature (28)..(29): n is a, c, g, or t
  misc_feature (31)..(31): n is a, c, g, or t
  misc_feature (648)..(648): n is a, c, g, or t
  misc_feature (703)..(703): n is a, c, g, or t
  nbla-11378-r1
ggnggnnggttnctntgaggccnttgtnnanccttttactaagaaagccagtaactttactgaattgtctgcaaaatacaaattataccttatttccagcaggagaagcttttgaaaatttcccacttttattcactacagacagctgaattaagtcccttgagatacacagatgtggtttaacttagttataacatcttgtcatctagtggcgacaaagtccagcttatgccgctgtgagcctctatttgaatatttgttgcaaatgcttgtatgccctcatttacaagcgattttaattactctcatttaatggaaacaagtccccaggaaaagaaaaagaagaaaaatgatacagcaaaccatctgaagcaatccaagtcctatgcctacagtgacccaggtctactttgctcgaagagaacactggtactgcattcaaaccacaacagaatccgtcacttaactgacctctctgaattaaactgaggtatgaatcaatttgaggtatgaacagggaaggcaaaatgcaataccagattatgaaaataaccaaaatggaaaaatttgatgtagaagatatgtggcttggattgctccacatctttgggttaaaacatattaagaaaagcctttaattacatctgnagctgaagcattctaacagacaccagtatttcagcaatcttcaaaagatctgtantggcagggaaattaacgccataaaagtgacgaca

SEQ ID NO: 297 - DNA, 723 bp, Homo sapiens
  misc_feature (4)..(9): n is a, c, g, or t
  misc_feature (11)..(11): n is a, c, g, or t
  misc_feature (15)..(15): n is a, c, g, or t
  misc_feature (18)..(19): n is a, c, g, or t
  misc_feature (546)..(546): n is a, c, g, or t
  misc_feature (609)..(609): n is a, c, g, or t
  misc_feature (621)..(621): n is a, c, g, or t
  misc_feature (677)..(677): n is a, c, g, or t
  misc_feature (686)..(686): n is a, c, g, or t
  misc_feature (688)..(688): n is a, c, g, or t
  misc_feature (703)..(703): n is a, c, g, or t
  nbla-11379-f
gggnnnnnntngggntcnnatttgaatcctttgagcctgctggcctactggcagatgctttttctttttctgttggaaactgaacacactacagacagtgaaaaaaggtacatattccattttctcattgcctgaagatctctgctgatgctcctggagaatgactttgggggctttagaaagaatattgccagtccgtctcggcaaggagatgatgggagcgctttatatggaggctttacatgacttgtaaattaaatgtgaatgagggcagttgattaaaattggtattacagaagggccctgctgaggtttgaaaacagctgagctgctgatgtctcaggcctttccctgaattagcactgcggttctccaggatatcagcaaagagggcaagtaatagaagcccctgataaggagcgtcagccgacaggcaagcttgggaggctgtgggaatgggtctgcccccagcttcacagacctcttccttcagcctctgaatcccattagccacagcctagaacattagctgagctgcacaagctnacccacccctgtgccaaggggccctgacctccttcatgccatgtttttggctggatctacggnacttaacaatanggggccttttattttcatacagagatattttgaaaaatttaaaaagacatgaactnacattaacngntatggatgataggtnaaaagagaaaccggtggagg

SEQ ID NO: 298 - DNA, 718 bp, Homo sapiens
  misc_feature (8)..(9): n is a, c, g, or t
  misc_feature (17)..(17): n is a, c, g, or t
  misc_feature (558)..(558): n is a, c, g, or t
  misc_feature (609)..(609): n is a, c, g, or t
  misc_feature (619)..(619): n is a, c, g, or t
  misc_feature (634)..(634): n is a, c, g, or t
  misc_feature (651)..(651): n is a, c, g, or t
  misc_feature (673)..(673): n is a, c, g, or t
  misc_feature (675)..(675): n is a, c, g, or t
  nbla-11379-r1
gaggggtnngttgtgtncctttgatcctttttaatatattcagagcacagaatttattgaacataatatggagacagctagtacaaaagtttatgccttggcagggcaggtttcatcaggctgataatggaacatgggagaacatgctgtaaatggctcttttggtctggaccctgcagaaatacatctccttctctctgggaaacatcatgtcagctgccaagccatgaatttattacatatcagaaaaccaaaatgtgcaacagtaaagagtcctttcctgcaccaactttttaaattacttccatgtcaaaacagcaaatacaatgaaaaatacataaaggacaaattatgaaaactaaagcattctaagacatctcttaagatactcagttcctaacatgttaacatacattgaagactataaacacacacatcagaaactgtgggaatcttttttcaacatagggagaaagacgtagaatagggagagacagcatgggttactgaaaccatttattcagaaagcagaggaaaggcgaaaggacactgaaatanacatttttaggttcttataggaagttccaaatggcagcagtgataaatcgnctttaaaaanggaacgacagcaccngaaatgagaacccaatntattttgcatttttctctcggngnatcatcttgaggcacccttacttaagcttcacaacgaatggaa

SEQ ID NO: 299 - DNA, 726 bp, Homo sapiens
  misc_feature (1)..(1): n is a, c, g, or t
  misc_feature (3)..(3): n is a, c, g, or t
  misc_feature (5)..(7): n is a, c, g, or t
  misc_feature (10)..(10): n is a, c, g, or t
  misc_feature (14)..(14): n is a, c, g, or t
  misc_feature (17)..(19): n is a, c, g, or t
  misc_feature (25)..(25): n is a, c, g, or t
  misc_feature (30)..(30): n is a, c, g, or t
  misc_feature (32)..(32): n is a, c, g, or t
  misc_feature (612)..(612): n is a, c, g, or t
  misc_feature (719)..(719): n is a, c, g, or t
  nbla-11469-f
ngngnnnggngggnttnnnttgacnccttngncctgctggcctactggaaatatggggcttcttggtctttatatgcacatctgagcatgctactgaaggcagaggaagggagatctcttagggagtcagcacatgcaaaatgctgtgccttcagactgcctctgctacctcttacaaggagcctcacaccgcaggctgccctttagctgttcccttggaatgcagccttgttaagtcactgccagcgtttcccctcttggcgtccctttctcttacctaagttgttaactccagacttcgctgctttcttaaaggctaaagtaatgggcagagtaaaaccctgaaatgtttagaagctatgcagtattatattgtaaacctgtaaaaattcttaacaaagttagtggcttggaaagattttcatgagaacttcagctaaaaggcagtaaagtaaatgccttaaaataactaaactttggcttataacaaggccattgtttggcaagtgtccactttttaaagacttttcagaacttggaggaggaaatgatcctgagacaaagtagtgatttaaaaaatgaagacagtaaattaacattgacattattcgncaacaattgattcttggctttcaactttttaccctgcattctgaataaatggaccatgtgaaggactagaagattactttaagggtttggtttgattggaaatgggnttggaaa

SEQ ID NO: 300 - DNA, 3121 bp, Homo sapiens
  nbla-11473
ctgtacggaagtgttacttctgctctaaaagctgcggaattcctcgagcactgtggcctttttttttttttttttttttttttttttaatgtgcagaggattgacctgtgcatgcttttgatctctcattcaaaggatcaatattaaataaaattgtcatgagctgtgttgaagacagggtgctttcaaatagaggtaatttgctcttgtgttgtaagaggaacatgtcaacaaagataggaaatgagggtgatcgtgcagatggcttgtatcttatatatgcaaaggagccaatctcagaagcacaaagaaaaaagtgtgcataccttattttgtacagataaagatgatgtctttttgttattgtctgtctgttttgtatgtgtctgagataagggatagagaggaaacatccgtcaggctaatttaactacattttattttaaaaatagagaaacataacctctagatgggacagcagaggacagttagtagaggccacaaactgttatgggctgctgtgttttgttctaaaatcaatatggttggagcatgtatatcttaggtgatcatttcacatcttaggaatgcctactcattttattttattctagtgatgctcaattcactatttaatttattatattttctcttctgtggcacttatacaaaatatctcttcacctacttagttctacagggttttaactttggagcaacatgaataaaatcatcgagaaggccaatattgtttagcaacatgaatacaatacagtttaaagttgtacacatcctgctcaactttattcatatacatttcctttctgtggttttcttttgcttcttagaaattctgttagtggttagtaaagaatttgaaagtactttctccttgctgtttttttttttttttaagacattcctcccagaatactccagggggcagtgttttataacacattttccccactgggtgattgaaggatggaggatttttgaaaatttgacagctacatgaaacatgagaaaacattttcctcacttctgaagtcggtttgcagctggtaacttgttcatccagaaaacattctaaagcaatgagactttgtgagctgtgcttacagtttgggagaatcatgaagattctttctatattttgcatttacttcccagtgcttcatagctgcattttgtttgtaactaagacagaagaatttcgtaatccttgaaattgaaaaaaaaaaaattgtgtttttaaagagtgaaaacagttagaaaacaagtagaactgtaatcagaacgctgcttcaattgatattaaaaataacctcaataataatgtaaaggttcctttctcttgtgtcagttatattcttagggatagcctagaaggaatatatggttagaactaagtgtgactaatcatctgagccttgaagagaaacttcagtgcctctaaacagatcatctacaaaacaacaggtaaacatttatgccagttaagtgggtcatgtttttgtttcttgggtttttcctaaatttaagtgaggttgggcttaccttgtagataaaattatgttttctttttggtaaatacttgaacgtggataacgtcaaatcagaatattttgtgaggaggtgatgatttgaaattaagctagatttctagggaggtgttggttccaatgaaggatgggaagaaattaaaatagtcttcaaacttcttccttattatatttggttgctttggaaaagattggtcctatcctcaatctaatttattcactattaatattttaaaaaacattcctgagatacttaaaaagacccacttagcgattatagttgctcaatgaaacaagaatttatttatgcatagatttttctctgtatcttaccaaaatccactttacttagataacactaaattgttcttaaagactactcatttcccaataatcctttatgatttcaaaatttctagtggctcagaagtgaattttattttatttgtctttcacttgaataaatgagaacccagaaattaataatgttgtttattgcttactgtcaggactatttcaaagactaagaagagtttcttctaacccctccctctcaaaggaatcctaaattattagttgttagataagttttgtatgctaagatattcgggtttatagtttatgtatgtgtgtatatatataaatatatatgtatatataaatattatgttcagtttggagtctggcacaactccattatgtggattagagagtaagatattatgggtgataaagtactaaatgaaacataatatttatttataaaagtgtgtagattgttaaatcacaaaaagagtgctatgaccattatgtatgaggaaacaggcctttgacctcctggaaagcactgctcaaaagtcattagtgcccatttttgaattccccaaacagaaagcttcttagaaaacatgctgagattttatttacagggaattctttgacacatttcaattggtgtgtagtcaagtatagcaagtacttaataatgactgaatttcatgttcctacagtcatacatattcattagaagttttatgttgttggtctgatctgattcttctttgtttgtgggtggaacggcactgagagaagtatagttttttaaacttgaacatgttcagtagttacattgccttagaaaacccagacacatagcagtggaaatgaaagaaatggcatcagaagtgacttaatttagcaattgtgattcctcttgtaaaacaaaacaaaaaaacaatgccatattttttggagaaaagttggcaatataggggtttcgttgtctgtttcacaagaagactcatttgttcttttgggggaaccagtgccttacagattttgtatatactgtaattattcaggactagggaacaaacaattgtattgtatttgttacagattgtatatggctttgttttaacattcccctaaataaaatggcttcattctccccttggaaaaaaaaaaaaaaaaaaaaaaaaaaaaaaaaaaaaaaaaaaaaaaaaaaaaaaaaaaaaaaaaaaaaaaaaaaaaggccacatgtgctcgagctgcag

SEQ ID NO: 301 - DNA, 718 bp, Homo sapiens
  misc_feature (2)..(6): n is a, c, g, or t
  misc_feature (8)..(9): n is a, c, g, or t
  misc_feature (11)..(11): n is a, c, g, or t
  misc_feature (13)..(13): n is a, c, g, or t
  misc_feature (16)..(18): n is a, c, g, or t
  misc_feature (25)..(25): n is a, c, g, or t
  misc_feature (38)..(38): n is a, c, g, or t
  misc_feature (569)..(569): n is a, c, g, or t
  misc_feature (579)..(579): n is a, c, g, or t
  misc_feature (588)..(588): n is a, c, g, or t
  misc_feature (592)..(592): n is a, c, g, or t
  misc_feature (605)..(605): n is a, c, g, or t
  misc_feature (619)..(619): n is a, c, g, or t
  misc_feature (623)..(623): n is a, c, g, or t
  misc_feature (638)..(638): n is a, c, g, or t
  misc_feature (659)..(659): n is a, c, g, or t
  misc_feature (681)..(681): n is a, c, g, or t
  misc_feature (691)..(691): n is a, c, g, or t
  misc_feature (699)..(699): n is a, c, g, or t
  misc_feature (711)..(711): n is a, c, g, or t
  nbla-11483-f
gnnnnngnngngnttnnnttgaganccttgagcactgntggcctactggtggaccaacaaaggggccagatgagtgaattgctgaaagcatcttgctgtaagacagggtcacaggacacaacattccaagtcatgtctcttcgaaacatgcaataacttagaatcagcatggtggtcatatgctcagacagttcagggagcaccatgactcttgggcggagcacattttaaacttggtgaatttaaatttcttttctttcccctagccttaaatggcctgaaatcctgaagtgaataccgaagacatcttaagagcgtgcttttagtgataaatgcctatgtttggggtgttttaaataatgaggttgtttgaaaagtagtgagaagtctttccataagaatggtttgtgactggatgttatatattttggtttacaaaattgtctgaaaacctttctggaataagtcagggtctatgtaaataaatctgcataaggaaagtactgtgctctttctacccattcaccctagagactgcaggtttttaaattttatggacttcacttcanagcagtttanggtcacagnacanttgaagactgcancgggtttaacacangtgncttcctgggctcttntcataactgttgcaacccaanggaatggctttctaaggagacntaaaatctgnaaggctgncctgtgcttaanccaatgg

SEQ ID NO: 302 - DNA, 703 bp, Homo sapiens
  misc_feature (2)..(2): n is a, c, g, or t
  misc_feature (4)..(5): n is a, c, g, or t
  misc_feature (10)..(14): n is a, c, g, or t
  misc_feature (20)..(20): n is a, c, g, or t
  misc_feature (30)..(30): n is a, c, g, or t
  misc_feature (32)..(32): n is a, c, g, or t
  misc_feature (468)..(468): n is a, c, g, or t
  misc_feature (597)..(597): n is a, c, g, or t
  misc_feature (622)..(622): n is a, c, g, or t
  misc_feature (639)..(639): n is a, c, g, or t
  misc_feature (652)..(653): n is a, c, g, or t
  misc_feature (668)..(668): n is a, c, g, or t
  misc_feature (687)..(687): n is a, c, g, or t
  misc_feature (689)..(689): n is a, c, g, or t
  misc_feature (691)..(691): n is a, c, g, or t
  nbla-11483-r1
gngnnggggnnnnnttgagncccttttgantncttttttaaacaattgaatcctaagggtatttttcttttggcgctgaaacgatattaaaatttactgcaactttatttaaaaaaatagaaaactaatgtttctctgggtcttccatttttgaataaaactgactcttaccacccaacacgtggatttggaaggatagcagtacaccaccttcttagctcacttggctggaacatgagctgatgaagtcctagtctcaagtttggccttcaagaaaactagataggcttgccctatgccggagccaatctagacctgccatcagttctgtttcttctttgtgtgtgtgtgtgtgtgtgtgtgtgtgagagagagagagagagagagagagagacagacagacagacagggtctcactctgtttcccaggctggagtgcagtggcatgatcatggctcactgtacctnaaccacccaggcccaaagtaatccttccacctcaccttcagagtagctggaactcaagggcatgctccacacccagctaatcttggattttttatagatccaggatcttgcatggtgctaagctggctnaaatgcccaactggccttgactccnggctcaagaatcatccncttggcttcacannggtggaatcaagggnggcaacccacctggccatnantntgtttttgacca

SEQ ID NO: 303 - DNA, 2650 bp, Homo sapiens
  nbla-11485
ttctaggcctgtacggaagtgttacttctgctctaaaagctgcggaattcctcgagcactgttggcctactggcctgcttggtggtggaaggttatatagtaaacttcactgtcattaagaaagcgcttgtccaaaatgtttaaagtactagaaaagggataattcagcactttttctgttacaacactaaagtcttaatttatcttcagagtcttaggtactgtaagtttttggatgattatttaaaaatataaaacatactacataatatggggtcagatcacatttatataaataattcttattttaaaaaagacaataacattttgtacctttctagcaattccaagtgattgcctcattttctcttgttaagcatttcaagcttaagaatttggaatttgagagaaggtgagggggaaaattccctaaaataaaaatttgtttcaaaccattttagaaaaataaatcactaggaaaataggtagggattctctccccctttaagtcttcagggaatgagcagtatttagaatctttggctgaaattcaagcctttttactttgtaaatttttaatattaattcactgacatgctttttacaccagaggactgaaaatggatcttaatgtttttaagttgtggaagggtatatttctaaaatgaggggggatgattaactaggttagtattaccagcattagtaagtttaaggaattttagtatgtaatagcaaagtgtttgattaaaagtctaatcctatattactagtcaaaattagttacattctgatctaggaaagataatagtcattggatattgatatgctgtgctgtcagaaaaccagactaagatagaaacctttatctgactcccacatgttgcttgttgtgatgggatgtatactttacagcagcttattgctgctttgaaaaaaaatgtataaactatacatttggagtgtttgcatataattctttataacctccacttaaagctgtcagacattggtattttatcagtccacattgttgaataaaactaatgttcttaggaatccagcttgtacacactgtttaaaaaccctcagggacagtttacacactcttctcactcaattcaggtactttgatgctattcttaaacctaacagtgacttgtatttttctgttttgcttttatttcaacgtgctggtagcacatctgatgaatgtcaacttaaaaaactcagttcaggtatccaggtataactcagccaaacagattttaaagctgcatataactctccagcacatggtgcctcacactcttatagtggcattctatatattcagttattactactgagcagataatatgggggttcctgttaacagtgtattttttaaaaaaagcgcataaatgtatagccagcacactacacacacacacacaaacatgcacagttaaactatatatttttaaatgccactaatagccagcacaactaaaacaaaagacattcctaactgctctgtaagctgttaacagatgcagttccttcttgatgtggctcttgcttcttcacgataactactactaaattcaagcactggtccttgggtgtctgacctctacattctagtttatgcaatgtctttagagaattttgtgcactggccactgtgatggaaccattgggccaggagtgctttgagtttatcagtagtgattctgccaaagttggtgttgtaacatgagtatgtaaaatgtcaaaaaaattagcagaggtctaggtctgcatatcagcagacagttttgtccgtgtattttgtagccttgaagttctcagtgacaagttttttctgatgcgaagttctaattccagtgttttagtcctttgcatctttaatgttaagacttgcctctttaaaattgcttttgttttctgcagtactatctgtggttaacaaaatagattatttctctgctttaatatttgatatcttacatctaaaataaattctctccacatataaaacccatagcctttggagatatggaaaatggtatctttcagatttctagaagttcaagtgtcatacaacaaaacaggaaccccctttactcttatggacctcatttcaatatactgtttacagtttgatggaattgtataatttaatatttctcttgtactgtagtttatatttatttacagatttttttgtactgtgtgatttgaactttttgttccttgctatgatcaatgtttatgtagtagagcacttatgatcacaaattaagttttttggtttgattgcactacattaaattttttaatgcagttctgatttttgactggactaaaactgtgtcttaatgtatgtgatgagtacttaaaattttaatccatgtggtccccccccttttttttttttttgcattgtatgtcaaaagcgcttgttctttcgtgcatgtgtaagatttaatggttccattgtattatttgaccatgacattttggagaaacattcccagctgtaatgttgtgtatggtagttctcactggatgctagagttttcaaaaccactattcttctaataaattttgttgtgaaaaactgttaaaaaaaaaaaaaaaaaggccacatgtgctcgagctgcag

SEQ ID NO: 304 - DNA, 743 bp, Homo sapiens
  misc_feature (3)..(6): n is a, c, g, or t
  misc_feature (8)..(8): n is a, c, g, or t
  misc_feature (11)..(11): n is a, c, g, or t
  misc_feature (13)..(15): n is a, c, g, or t
  misc_feature (17)..(19): n is a, c, g, or t
  misc_feature (24)..(24): n is a, c, g, or t
  misc_feature (460)..(460): n is a, c, g, or t
  misc_feature (738)..(738): n is a, c, g, or t
  misc_feature (742)..(742): n is a, c, g, or t
  nbla-11519-f
ggnnnngngtngnnncnnnttggnttcctcggcactgttggcctactggaatcgctgcagtaacttcagggctgtttgctctgctgctgacctcactgtacgcaaattagcccttcttctgaggctcaactatgctatgtccattaccctagttactgctcacaatctacataatgtgacagatcatgaaacatgaactagtaaaatgtgtatttataaagtaggcaataccgttattgttttcagaggaaatgacagtatgtctagagagctcatgaaaaatagaagagatagaaaatgggtattccaaagcctagaccttttaaaagcaattatcaatcataagctataatgaaaagaatgtgattcacaacagtggttcttctgtgagccagatgggtgtggattccattcagaagtagtgcatagtccccaagcttgcacctcacttgagccctgnatccccaaatcattctgtttttgtccagagtttcacaaggttgattttgaaaatgttcccaccagctctggctatgggaatcacagtgggaaataaacgccatagcatcttccccatcatccccgtctcctcctgagacaaaacacattttcccctaaatgctaactgggctgctgccttcagcatagacaatcttttacatttttaccacaaagtagttttaactgcctggccacataccaattgaatagtatgatgtctgggtaagggcagaatantggnt

SEQ ID NO: 305 - DNA, 755 bp, Homo sapiens
  misc_feature (2)..(3): n is a, c, g, or t
  misc_feature (5)..(6): n is a, c, g, or t
  misc_feature (10)..(14): n is a, c, g, or t
  misc_feature (35)..(35): n is a, c, g, or t
  misc_feature (619)..(619): n is a, c, g, or t
  misc_feature (675)..(675): n is a, c, g, or t
  misc_feature (743)..(743): n is a, c, g, or t
  nbla-11519-r1
gnngnngggnnnnnttgtgtggccttttttttttntttttttgaaagtaacaatatcattttattgcagggtggcataggtagttgtacttattaaatacatgacaaataggtaccagcagatgagttagatgtagggatacagatggaaataaacttccatggtccccattcatcaaatttattgtcctctgagaaagacatgagttcatctgatcattacagaggagatgagtgttttgaaggagaagcagagggttttgtggatgtgattagcaggtggacctaaccagcacagtgggtcagggagggattttctcaggaaataacattcaggctggagtctgaatcttgagctctgaagcaggtgtcaggacattcagagcaaagtggattatatttgcaaaacttcacatgctaaaagatgagagaagtccagtcagtagcaagttgttctttggaggtcctcagaatatgtcacagcttcttgattcctccttacatgcctgtaagagatattcactatccaatcaattgtttatcacagaccctactatgaatgagattccatagaggatacaaaggatgtgtaatacacttcaaagtaatttaaggctcangagcaagctacgaatgaattaagaaaataaggcaaagacaagtaaatattcaatgncattaaagagcatgccggaatataagaaatggtggtcaaactaggtccactcaatgggtcaagttgangggcatatgtca

SEQ ID NO: 306 - DNA, 731 bp, Homo sapiens
  misc_feature (2)..(3): n is a, c, g, or t
  misc_feature (5)..(8): n is a, c, g, or t
  misc_feature (10)..(19): n is a, c, g, or t
  misc_feature (22)..(25): n is a, c, g, or t
  misc_feature (33)..(33): n is a, c, g, or t
  misc_feature (599)..(599): n is a, c, g, or t
  misc_feature (664)..(664): n is a, c, g, or t
  misc_feature (673)..(673): n is a, c, g, or t
  misc_feature (731)..(731): n is a, c, g, or t
  nbla-11530-f
gnngnnnngnnnnnnnnnnttnnnnttcctcgngcactgttggcctactggcttttcttgaaacatcttgattgcttttcctcggcagctttcaaaaaaccaaataataatagttatccgtcttctacttcatggaagattgttttggtgccctgaccctctgaagtgcccagttcctgccatctgaaacctcggcctgatctgatctcatgttggaatctgcctgtctttcacacagggctggtcttggtcctttacatgccagttttgcttgtgaattcttgcttttttcctctcatcagccttaagtttaggcgtttgttgttctccagtgatgtagacagttcccttcacaagtcacagttcttcccataaatgaggcccgctgacctctgcgggactttaaaaatctattcagatatttccgagtaagtggcttgtttaaattcttcctgtgtctttctttattccttaattggttggtggaaagaagagatgcttgggaaccttgggttcttaggtttggattctttaataatatctaaaaagctaaattttaaataccagctttacataaatgattggtgactctggtctgnttctgacacctttccagaaaaaagcaattggtcaagtacaccaaagaggaagaagaactgtggangccaccctntacaaagctttatagaacttctggatctaacttacaaacaagctttcagaagagactn

SEQ ID NO: 307 - DNA, 766 bp, Homo sapiens
  misc_feature (2)..(8): n is a, c, g, or t
  misc_feature (10)..(10): n is a, c, g, or t
  misc_feature (14)..(23): n is a, c, g, or t
  misc_feature (26)..(26): n is a, c, g, or t
  misc_feature (28)..(28): n is a, c, g, or t
  misc_feature (37)..(37): n is a, c, g, or t
  misc_feature (242)..(242): n is a, c, g, or t
  misc_feature (583)..(583): n is a, c, g, or t
  misc_feature (648)..(648): n is a, c, g, or t
  misc_feature (651)..(651): n is a, c, g, or t
  misc_feature (696)..(697): n is a, c, g, or t
  misc_feature (707)..(707): n is a, c, g, or t
  misc_feature (732)..(732): n is a, c, g, or t
  misc_feature (746)..(746): n is a, c, g, or t
  misc_feature (755)..(755): n is a, c, g, or t
  misc_feature (765)..(765): n is a, c, g, or t
  nbla-11567-f
gnnnnnnngngggnnnnnnnnnnttngnattcctcgngcactgttggcctactggatccagttcaggccgatcagggctggtggaaacaactaccaagtgtctctctgtctgctttgctttgggagaagaaagtggagggagccccagcatgttgtagaggaactggcctgcggaaacgagaggaggagggtgcagggggcagcggaacagactgaacctcagagcatcagttggaattacnatctgaggctgtcagagatgactctggttctgtccatgaatagattctgcgagcccattgtctcggaaggagctgctgaaattgctgggtaccaaacactatgggaggctgacagctacggaggcccaagccccccagggccagcacaagctcctttgcagggagaccggggagctggtcccccactggcaggatcacattacaggggaatttcaaatcctataacaacatccaagatcacatactttaagaggaagtatgtggaagaagaggactttcacccaccactcagcagctgtagccataaaaccatctcaatttttgaggaacgagcccacatnctttatatgtccttagaaaagctaaaggttatcgatgatcctgaagtgtaccttcgaagatctgnccntataaacaatttgatgaaaaggatccatggagaaattatcatgcnngaatactggngctttccttgctggtctttaatggnaccttttgccaaantggttatgntcaagactgnc

SEQ ID NO: 308 - DNA, 772 bp, Homo sapiens
  misc_feature (2)..(8): n is a, c, g, or t
  misc_feature (13)..(13): n is a, c, g, or t
  misc_feature (15)..(16): n is a, c, g, or t
  misc_feature (18)..(22): n is a, c, g, or t
  misc_feature (27)..(27): n is a, c, g, or t
  misc_feature (627)..(627): n is a, c, g, or t
  misc_feature (663)..(663): n is a, c, g, or t
  misc_feature (691)..(691): n is a, c, g, or t
  misc_feature (709)..(709): n is a, c, g, or t
  misc_feature (716)..(716): n is a, c, g, or t
  misc_feature (723)..(723): n is a, c, g, or t
  misc_feature (755)..(755): n is a, c, g, or t
  misc_feature (771)..(771): n is a, c, g, or t
  nbla-11568-f
gnnnnnnngtggngnncnnnnnttggnattcctcgagcactgttggcctactggagctctgtcttcatcttcaaaagatttagaaacaatagttactcttaagaagactatcagaatctcaccacacagggagagtgaccattctagtctaaataacaaatatttgaatggatgtggagaaatatcagtttcagaaatgaatgaaaagttgacaactctgtgttataggaagtataatgatgtctctgatctttgcaaattagaaaataaacaatattgtaggtggtccaagaaccaagatgacagttttacaatttgcaggaaacttacatatcctttagaaactctttgcaatagtccaaatagaagtacaaatacattgaaagaaatgccttggggacatatcaataacaacgtaacacagagctattctattggttatgaaggtagctatgatgcctctgctgatctctttgatgatattgctaaagaaatggacattgcaactgagattaccaaaaaatcacaggatattttggtaaaatggggaacatctttggcagaaagtcacccttcagagtctgatttttcactgagatcactttctgaagacttcattcagccttnacaaaaattatccttgcaaagcctatctgactctangcattcaagacatgctcttcaacacctnattttcaatcagattcangaatatnattttgnaaatagtcaagactttggtccatgttcacagncaacttccaatttcang

SEQ ID NO: 309 - DNA, 771 bp, Homo sapiens
  misc_feature (4)..(4): n is a, c, g, or t
  misc_feature (7)..(7): n is a, c, g, or t
  misc_feature (11)..(13): n is a, c, g, or t
  misc_feature (35)..(35): n is a, c, g, or t
  misc_feature (578)..(578): n is a, c, g, or t
  misc_feature (645)..(645): n is a, c, g, or t
  misc_feature (657)..(657): n is a, c, g, or t
  misc_feature (701)..(701): n is a, c, g, or t
  misc_feature (708)..(708): n is a, c, g, or t
  misc_feature (714)..(714): n is a, c, g, or t
  misc_feature (720)..(720): n is a, c, g, or t
  misc_feature (728)..(728): n is a, c, g, or t
  misc_feature (732)..(732): n is a, c, g, or t
  misc_feature (761)..(761): n is a, c, g, or t
  misc_feature (765)..(765): n is a, c, g, or t
  misc_feature (768)..(768): n is a, c, g, or t
  misc_feature (771)..(771): n is a, c, g, or t
  nbla-11568-r1
gagnggngttnnnttgtgtggccttttttttttcnttttggtttgcaaagtctttatttctggatgtatatgtgattttaacaaacattaatactttcaaaaacaatcttaacaatattattaaagtacaataaacagtataagataaagtgctcaactacctaatcatagtattctagataaaaccctggggaaaacaatggctttatattttaaaaggcacagcagctcccagcagagtcctgttttcaatttgcttctctccaagtgttcaaaatgtaaagaatgctttccgtacccctgaaggcaaacatttccaaacagatttaaaagttcaggaattgggttcaggtgactttttatgaaaacaattcaggtgaccaagcacttcgagtttcacacactgaaggtgggcctttttctgaaaatggaaggcaacatttgacttctgaacaagaatcaggtccaagaatagggtgcagctgaggtgctgctaagacttgaatgtctggacatttggaaatccagcctgaacttttacaggtatatttatgagttttctttttcgtaacaactgntgcaagcatattctttaatttcttcttaattaaacctttattgggtccttggctaatatggttcaanttctttcttggnaactcttggtggatcaagggaaatgattggcagcaaggcatttncctaganctatgncttggnatccagcntttntgaagggaatattttttggggggtaggangganccnttn

SEQ ID NO: 310 - DNA, 753 bp, Homo sapiens
  misc_feature (2)..(3): n is a, c, g, or t
  misc_feature (5)..(5): n is a, c, g, or t
  misc_feature (8)..(9): n is a, c, g, or t
  misc_feature (11)..(17): n is a, c, g, or t
  misc_feature (24)..(25): n is a, c, g, or t
  misc_feature (31)..(31): n is a, c, g, or t
  misc_feature (612)..(612): n is a, c, g, or t
  misc_feature (687)..(687): n is a, c, g, or t
  misc_feature (729)..(729): n is a, c, g, or t
  misc_feature (746)..(746): n is a, c, g, or t
  nbla-11600-f
gnngnggnngnnnnnnntttgaanncccttntttgagatccctcgagcactgttggcctactggaattagctttagatacagcagtagccctttccttatgtccttgtgatgcctgagtaaagaacatagtttttacttgctaagctatgagattttgccgcctgtagtagtttttaaaatattgagtggcctatctccagatctcccaaacagattcatgaacaccatcttgcttttgaacatgtcgattttaaagtacgaggccaatatgatattgccccaagctcatcattgttcttgatgagaaatgtagtccaggattcttagaaactttcttaatgtgatctttcatttaatgttctgtgtcattttaaggactagaatatgctattttcttaagtgtttttttctcccttgacagttttaaacatattgtcttttgcttccaagcccttccattgctgaacagtttttgtaggacagtcttcagctttatcattaagctgaatccctatcaacatctagctgtccaagtgagttatagatggccagtggctctgctttttactagcctgcaccctcttagctaaccttctttttttagggtttgnatttttagctataacttatttaacactatcaggtgttagatgccatgccaactggtttatgtacttgagaagcangtgttaacttcctcagttacaaatgagaaaacccagcttaangggattgactcatttgncaatagg

SEQ ID NO: 311 - DNA, 751 bp, Homo sapiens
  misc_feature (2)..(2): n is a, c, g, or t
  misc_feature (4)..(5): n is a, c, g, or t
  misc_feature (8)..(8): n is a, c, g, or t
  misc_feature (13)..(14): n is a, c, g, or t
  misc_feature (35)..(35): n is a, c, g, or t
  misc_feature (457)..(457): n is a, c, g, or t
  misc_feature (547)..(547): n is a, c, g, or t
  misc_feature (677)..(677): n is a, c, g, or t
  misc_feature (684)..(684): n is a, c, g, or t
  misc_feature (687)..(687): n is a, c, g, or t
  misc_feature (692)..(692): n is a, c, g, or t
  misc_feature (719)..(719): n is a, c, g, or t
  misc_feature (721)..(721): n is a, c, g, or t
  misc_feature (727)..(727): n is a, c, g, or t
  misc_feature (745)..(746): n is a, c, g, or t
  misc_feature (748)..(748): n is a, c, g, or t
  nbla-11600-r1
gngnnggnggttnnattgagtgccctttgttaatnccctttttttttttgagacagagtctcgcactgtcacccaggctggagtgcaatggcaggatctcagctcgctgcaacctccacctcccaggttcacacgattctcctgcctcagcctcctgagtagctgggattacaggcacataccactacacccggctagttttttgtatttttagtagagatggggattcactatgttgaccagactcgtcttgaactcctgacctcgtgatccaccccactcggattcccagagtgctgggattacaggcatgagccaccgcgcccagccagcattgtatactcttccaaaggtacttctgaagtttgaaccacatgaataaattttctaacataaaaagtaaatttattgttcaaaagttcattatcaagtggcccaaagctataaaacttatggntaacatatttagcctcaggaaacttagctttaggaaagtcaatctggagagacatgaatgaaaaatgattgcctgctgaaaattaagcanttataatggttaacgataataacagaaaaacttctatggcatttactatgtgccatttgaaactttaccaaaactaactcatttaatccactcaagaatccgcttaagtaggtactggtggtattctttncattttncanaagangagaaactgaggggtaagacattcagnantttggncaaaggtacataataagnnanggg

SEQ ID NO: 312 - DNA, 736 bp, Homo sapiens
  misc_feature (2)..(2): n is a, c, g, or t
  misc_feature (4)..(9): n is a, c, g, or t
  misc_feature (13)..(16): n is a, c, g, or t
  misc_feature (23)..(23): n is a, c, g, or t
  misc_feature (25)..(25): n is a, c, g, or t
  misc_feature (28)..(28): n is a, c, g, or t
  misc_feature (655)..(655): n is a, c, g, or t
  misc_feature (666)..(666): n is a, c, g, or t
  misc_feature (697)..(697): n is a, c, g, or t
  misc_feature (702)..(702): n is a, c, g, or t
  misc_feature (720)..(720): n is a, c, g, or t
  nbla-11618-f
gngnnnnnntttnnnnctttgananccnttgggcactgttggcctactggtctcatctatgatgtcttttgggtatttttctcagcctacatcttcaatagcaacgtcatggtgaaggtggccactcagccggctgacaatccccttgacgttctatcccggaagctccacctggggcccaatgttgggcgtgatgttcctcgcctgtctctgcctggaaaactggtcttcccaagctccactggcagccacttctccatgttgggcatcggagacatcgttatgcctggtctcctactatgctttgtccttcgctatgacaactacaaaaagcaagccagtggggactcctgtggggcccctggacctgccaacatctccgggcgcatgcagaaggtctcctactttcactgcaccctcatcggatactttgtaggcctgctcactgctactgtggcgtctcgcattcaccgggccgccagcccgccttctctatttggtgccatttactttattgccactcctcacgatggcctatttaaagggcgacctccggcggatgtggtctgagcctttccactccaaagtccagcaagcttccgattcctggaagtatgatggatcacgtggaaagtgaccagatggccctcatggnccttttctctnaactcatgggttggttcctcttaaagctggnctggnacttaaaaatgtacctgnggttaaaggaactgcc

SEQ ID NO: 313 - DNA, 733 bp, Homo sapiens
  misc_feature (2)..(7): n is a, c, g, or t
  misc_feature (20)..(24): n is a, c, g, or t
  misc_feature (261)..(261): n is a, c, g, or t
  misc_feature (537)..(537): n is a, c, g, or t
  misc_feature (561)..(561): n is a, c, g, or t
  misc_feature (621)..(621): n is a, c, g, or t
  misc_feature (682)..(682): n is a, c, g, or t
  misc_feature (710)..(710): n is a, c, g, or t
  misc_feature (719)..(719): n is a, c, g, or t
  nbla-11618-r1
gnnnnnntttgagggccttnnnnnttttttttttttttttttgcttttttccttttttttttttttcttaaaggagtgagggcatggaaaatatacagcacaccaatgaaacaaaatgtcaaaaaaaaaatacaaaaaaatagaaaatagaaaaatgtatttacaagtagtacgttactatgatgagaaagcacaaagacacctgctgctataatacatgcattggctcgagaagaaactacggaacaccctgcgaggganaagcctagaaaagaaagaaagggccaaaaggtttgaactcttcatccccaatttgctacactgatcaaaaccaagtaagggctcctgaagtccatgagtctatcatcaatcagcacaaatgctatactagtttgtaactgcggggtcagttgtgaaggggaaggacagcagcttatccatatacaaggaagccacagtaaactgctcgacatgctcaaaacgacagcaagcccctgtcagctacacagcgtgatcttagcaggatttcatttttgnttattcatatatatctatgtgtgngtttatatatatgtccgtatgtataaaaaccgtgcccttgttcactggcaacacaacatntgggtggacatgaactcattcaacaaattcttatgtggatgttgtaagaagcactcaatgnctggggatttaataagcactttacaccncagaaaatntttaataaatccca

SEQ ID NO: 314 - DNA, 2036 bp, Homo sapiens
  nbla-11652
taggcctgtacggaagtgttacttctgctctaaaagctgcggaattcctcgagcactgttggcctactggctagtttgcatttgcggaagatcccatgcagaaacagatgtcacactgcagctgcaaggacagtgaggagggagatggccatggtgccttggtccccagagtgacggcatgcggaggcgtcaatgcatctacctccagcacaccaggcatgatgtcaggtgcagcaggaggtacctggccctttgctacacagaccacatggtcttgctggggacaagacctagggaacagctcattttggtacagtgtggttggttcctggagagggagagggaatagcccacgggctaagcagcccactgcaggtacctaatgcaaccaggaaggtcagggaaggagatggccagccacgcggtggagtttgaacatcatgtagcagttagccaggtgaagaggagatgctggggagacagggagaggccactcctggctgagggacctgtacctgcaaagactctcaggggaggaggacggctttctgtcactgtttctgtgtgtgagggaaatcagagggtaggcccggctgtcccctgcctttcctgtggggcctgactgcatgtaccccctctccccaaaccctccaggagttctgagtctctacctggatcttgattccactggcatgaaatctgtgaatctcacctcgagaatcctccctctgctgccgcaggatgggaccaacagttccctgcagtggcaagggagctgttcacacactgagcgagcagtcacagctgccctgagctccacattctcctcctcgggggactcccctggaattacctttgtcattttactttctcaacccctgtgtttcctctgatatcttacttatctctggtctttttgtccagacagctcttaagccttgggaggaaccttttcctctgatccctttttaggccattatcaagttcagggtgggagggtagagtcactgtctttccaggccttgctgcatcccttagagaccttcggagggggcactttgtgaccagtggggatgggggaaggatggcttggtgtgtctgtcctcacccactaccctctgcccacttctgcctgcccttcctctgtgtggcatatacagtactgcacccctgagcaggacattccccagtgagagccccaggcccgacacttccaggctgtgtggccttgatcaagttagtttccctttcgtgattcagattcctctcaggctgcttgtgcaaactcaacataagaaagtctgcgaagctcttaacccagggcctgggccatgctagggggatcagtaagcagtttctgccacctctgttactgccgctttcacctttccttgtggaaaagagaagcagccagaaaagctgggttttagccccagctctgcctcttaactagctaagtaaatgtgggcagaatgcttgacttctctgaatctcattttttttttttttttttgtcaaacaagatgaatgaacaggatcggtcttttttgatggggacttgaatggtgtgtggggggacagttctttgtgtgggacggtccacactaaatgccagttatccccacccattgttacaacccaaatgtcaccccccaccaagtatttctccatgtccctatgggttggtggtggaactgtccctgactgaggaccactgaactagcttaccctaaacttcactcctgctccggtgtcctgtgtgggtggaaaagtgaggacccagtggagcaggtagacaaagatcagttcaacagggccctctgctcctttgatattgggacagcttcacttcctctgaattagaagcttcttgacctccatatattgaggaaggaaggggtttctaacaaatgaagaaacaggctgggcacagtggctcatgcctgtaattcccctttgggaagcccagttccatctctaaaaaaaaaaaaaaaaaaggccacatgtgctcgagctgcaggtcgcggccgctagac

SEQ ID NO: 315 - DNA, 728 bp, Homo sapiens
  misc_feature (1)..(6): n is a, c, g, or t
  misc_feature (8)..(12): n is a, c, g, or t
  misc_feature (16)..(19): n is a, c, g, or t
  misc_feature (22)..(22): n is a, c, g, or t
  misc_feature (28)..(29): n is a, c, g, or t
  misc_feature (632)..(632): n is a, c, g, or t
  misc_feature (676)..(676): n is a, c, g, or t
  nbla-11674-f
nnnnnngnnnnnttgnnnnccnttgggnnccctcgagcctgttggcctactggaaaaaggaagcaaaagaagtttttccaaagatgttatgaagggctctaatccaaaagtaccacagcaaaacaacttcagtgactgtggtgtatatgtattgcagtatgtagagagcttttttgagaatccaattctcagttttgaactacctatgaatttggcaaactggtttcctccaccaagaatgagaacaaaaagagaagaaatccgaaacataattctgaagctacaggaagatcagagcaaagagaaaagaaagcataaggacacttactcaacagaagcacctttaggcgaaggaacagaacaatatgtcaatagtatctcagattgaccatttctgttacttgtcatttctactttcagaaactaaatgactttcaaatttgggtatagacaataaagaactgaagtgctcactactcagtgatttggaaattttgatgcttgtataaatgtcagataattaatttccaaaggcgtatgtattaagtaaaagtctgtaaatatgttaatgaggccaatttttccagcatttataattatttttttcacttggtaggaagcttttggtatgnatttctggtaatagtacctaaaattgcaacttctaacccaaatnaaaaggaaaatatttataggaggaaatgattaattggtatcttagggaactg

SEQ ID NO: 316 - DNA, 729 bp, Homo sapiens
  misc_feature (2)..(4): n is a, c, g, or t
  misc_feature (6)..(13): n is a, c, g, or t
  misc_feature (21)..(21): n is a, c, g, or t
  misc_feature (34)..(34): n is a, c, g, or t
  misc_feature (114)..(114): n is a, c, g, or t
  misc_feature (608)..(608): n is a, c, g, or t
  misc_feature (719)..(719): n is a, c, g, or t
  nbla-11674-r1
gnnngnnnnnnnnttgtgtgncctttgtttttcnttttttttttttttatcccagttttattatagattgaaaagcattttgccatgttcagtaaataataaaattaaacttgnttttcatatgagctaattaagatatctgagctaacagctctaagttattactataaagagttaatcagaaatatagttcaaagtaacaaactacagttgatatcactaatggtgacctttcttacattttaatatttctcttactgagactctactgcgtctcaatagatattttttggttgttgttaatactcccattcaccctgaacccacccatgggactttattaaattcaagaaaataccctaagatattgactgcaatgtcagagatggccaaattaaaaataaaataattgctgatgattaggctttctttttattctcaactatttttgatatatgtgtatttaaaaattcaatatttaacaaaaaatgactaaaatatgtttcaagtctcaaagttcatttgaaagaagtatacaccatttcatttgaaaaataatgaagtttctgcagatatatgcaagatccctatatgtgctataaatctgncatggaaaccatcaaattttagttattttaaaggggaattcaaagatttttgctggattatgcaactggtggaatacgtactttacatgtaaaaaataattaccctggagnaactcaagcc

SEQ ID NO: 317 - DNA, 776 bp, Homo sapiens
  misc_feature (2)..(2): n is a, c, g, or t
  misc_feature (5)..(5): n is a, c, g, or t
  misc_feature (10)..(11): n is a, c, g, or t
  misc_feature (21)..(21): n is a, c, g, or t
  misc_feature (24)..(24): n is a, c, g, or t
  misc_feature (547)..(547): n is a, c, g, or t
  misc_feature (594)..(595): n is a, c, g, or t
  misc_feature (610)..(610): n is a, c, g, or t
  misc_feature (624)..(624): n is a, c, g, or t
  misc_feature (626)..(626): n is a, c, g, or t
  misc_feature (633)..(633): n is a, c, g, or t
  misc_feature (636)..(636): n is a, c, g, or t
  misc_feature (653)..(654): n is a, c, g, or t
  misc_feature (657)..(657): n is a, c, g, or t
  misc_feature (662)..(663): n is a, c, g, or t
  misc_feature (670)..(670): n is a, c, g, or t
  misc_feature (683)..(683): n is a, c, g, or t
  misc_feature (696)..(696): n is a, c, g, or t
  misc_feature (699)..(699): n is a, c, g, or t
  misc_feature (705)..(705): n is a, c, g, or t
  misc_feature (711)..(711): n is a, c, g, or t
  misc_feature (713)..(713): n is a, c, g, or t
  misc_feature (715)..(715): n is a, c, g, or t
  misc_feature (719)..(720): n is a, c, g, or t
  misc_feature (733)..(733): n is a, c, g, or t
  misc_feature (736)..(736): n is a, c, g, or t
  misc_feature (740)..(742): n is a, c, g, or t
  misc_feature (760)..(760): n is a, c, g, or t
  misc_feature (764)..(764): n is a, c, g, or t
  misc_feature (771)..(771): n is a, c, g, or t
  misc_feature (775)..(775): n is a, c, g, or t
  nbla-11679-f
gnagnttggnnccctttttgngantcctcgagcactgttggcctactggaagttagttattttctcctctttctttcctttctttcctccctttttcccgtctgaccccaaacgttattgtccaaacatgactggacagcagcttttgtttcttgaccctgtaatatgacagtctgctaatattgacagaaggtgcagtttttgggttatagtcgtgattttcactaatcaatcatattagcaggaaaaaaaatgacttgtttctgttgtacttgagtcttaagaaaaagtgcccatagtttagtgacaatttccaaaggctttagtaccacctgtatttcaaaatgggggacccaaactcccggaagaaacaagctctgaacagactacgtgctcagcttagaaagaaaaaagaatctctagctgaccagtttgacttcaagatgtatattgcctttgtattcaaggagaagaagaaaaagtcagcactttttgaaagtgtctgaggttataccagtcatgacaaataatttatgaagaaaatatnctgaaaggtgtgcgagattccagctattcccttggaaagttccctannagcttttaccagaangatgtgggtccagntncatgctnctngatatcaagtcctatgnnaanggganngaaattngctgtactcaggnagatggatttcantcntttggnccttcngnantganntttgaaaaaaatncgntggnnntcctggtttctaaggggntaanaattctnatgng

SEQ ID NO: 318 - DNA, 753 bp, Homo sapiens
  misc_feature (2)..(3): n is a, c, g, or t
  misc_feature (5)..(6): n is a, c, g, or t
  misc_feature (8)..(8): n is a, c, g, or t
  misc_feature (579)..(579): n is a, c, g, or t
  misc_feature (598)..(598): n is a, c, g, or t
  misc_feature (611)..(611): n is a, c, g, or t
  misc_feature (634)..(634): n is a, c, g, or t
  misc_feature (645)..(645): n is a, c, g, or t
  misc_feature (705)..(705): n is a, c, g, or t
  misc_feature (710)..(710): n is a, c, g, or t
  misc_feature (740)..(740): n is a, c, g, or t
  nbla-11679-r1
gnngnngnttggtggccttttttttttttttttccctggttgtattttctttttttaaaccagttctggtcattagaatgtatctgacagtgctctggaacaactgtgattatagcaaagttattgtttttaaaaatgttatttatacctgttacattcacttctcaccctctaaatactgatgacagatgtcaaagaggcaaaaaccagcacaaatgggaagaccataaaaatgagtatcaccttgtgctttcagatacatttaagcatttcagtgtacaatagtcctttcatttcacatttttagtaagatactgatgcagtgcagcaaatatgcaaagcatcttctttcacacagtccgtgcacgacatctaatttttgtttaagttctgagataaaaatgatttaaaaaaatccaggatgaacaagtttcaaaatgcatagtgttctgtgcatgagtccattttctttaaactctgaaagaataaagtggtaagaaaacaagaaaaaaaactgctgctgcattctctgatcttctccattttgctggcagtactctactctggcatataaggacngaggtggatcctctatggngccaactggccantgggtgaactggtcctgtggcangtagaagcaanatgctgataacttggaagattggaactttggtttttggagtctgcaagtgctgctgtcantgaanaagaaacactgactgggtaggattggtggncacgattccaggc

SEQ ID NO: 319 - DNA, 799 bp, Homo sapiens
  misc_feature (2)..(2): n is a, c, g, or t
  misc_feature (4)..(4): n is a, c, g, or t
  misc_feature (7)..(7): n is a, c, g, or t
  misc_feature (557)..(557): n is a, c, g, or t
  misc_feature (603)..(603): n is a, c, g, or t
  misc_feature (685)..(685): n is a, c, g, or t
  misc_feature (768)..(768): n is a, c, g, or t
  misc_feature (797)..(797): n is a, c, g, or t
  nbla-11753-r1
gntnagntgtgcctttttttttttttttaagtgtaaaagttatattttattgccatgctacaaaatgtatgaagttggcactgatagggagaaatagagaacaaagggtgggaagggatagagggaaaattatgttgttacatatacaacaaggttttattttaattaacagtggttacgttttgccaatattaaaaatgcaaaccaaaatttaaaatgctgatctgaaacagcattaagatacaatgtatgcatagtacagtatcacttatgtctttttattagagaaatatggaatgtttataaaagaaattaaccatgggggtaaaattcatatttcatatacaatttggcaatggtagtcccactgttggacaattttttataaaagaaaaaattaaaaatctaataagctacctttatacaaagttgctatatttatgcctttacgtaggaaaaaaacatttataatgcaaattaggacatacaatagtcttacaatattatacaatgtaatgaaaataaaacataacacaaagtttgcctttataaaatgnatattttgcattactaatgcaaatgtggcacactggtgactactgnactatttatccagtctgtttccatgctataactgtccaattgccatagaactgcaattataatgatgcttcaaaagaactgngttataccaaaaatgaggaagtagggatggggaacagggatgtaaagaacaggaaagatagatagggtgcctggtttgggcanagatactggggtccgtataaaaaatggtnat

SEQ ID NO: 320 - DNA, 759 bp, Homo sapiens
  misc_feature (5)..(5): n is a, c, g, or t
  misc_feature (605)..(605): n is a, c, g, or t
  misc_feature (611)..(611): n is a, c, g, or t
  misc_feature (628)..(628): n is a, c, g, or t
  misc_feature (632)..(632): n is a, c, g, or t
  misc_feature (644)..(644): n is a, c, g, or t
  misc_feature (655)..(655): n is a, c, g, or t
  misc_feature (658)..(658): n is a, c, g, or t
  misc_feature (677)..(677): n is a, c, g, or t
  misc_feature (690)..(690): n is a, c, g, or t
  misc_feature (722)..(722): n is a, c, g, or t
  misc_feature (751)..(751): n is a, c, g, or t
  nbla-11763-f
ttggnttccttggcctgttggcctactggtgtgaatattggaaattaatgggtttcattttcatttatttcccttgcctcttcttgaggaggattcgacaggcgatgaaatgggtaaaaaggcagtcagactaacaggaagaaggaaagataggctagctgtcaactgatgagcctgcctgaataatctcaaatgggcttttgaaaagaccttaacaaacactgttgcactcttgtcaaatatctttatctacaccctacttataagtaccaaaaagacagcatttgatgccaagtttgaagcagttaggtcctatgcaggctgtgtattaacatacagtgaattgcactttaaaattcagaaagctttcatttggtcacatcaaaaataaacactacaaaatatataaaaagttaaatgataggactctttttttggtattaagagtaaaatagaagaagatctaagaaatacaaatacttacattatttctccttatgacattaactttgggactagagccacaccacccccttccttcttcacttactgattggattgcatataattttcatgcccacataaatcctgattcatatatttgnaactgnatatgacaaattgagangcangaataagaaaanggaagattatnganggaagatgttaagaaagancagttcttctaantactctggcagatcgggtggctgaaagaggtnattagcatttgaaatggatgggctgatgnggggctca

SEQ ID NO: 321 - DNA, 759 bp, Homo sapiens
  misc_feature (536)..(536): n is a, c, g, or t
  misc_feature (556)..(556): n is a, c, g, or t
  misc_feature (583)..(583): n is a, c, g, or t
  misc_feature (590)..(590): n is a, c, g, or t
  misc_feature (599)..(599): n is a, c, g, or t
  misc_feature (608)..(608): n is a, c, g, or t
  misc_feature (622)..(622): n is a, c, g, or t
  misc_feature (642)..(642): n is a, c, g, or t
  misc_feature (644)..(644): n is a, c, g, or t
  misc_feature (651)..(651): n is a, c, g, or t
  misc_feature (662)..(662): n is a, c, g, or t
  misc_feature (697)..(697): n is a, c, g, or t
  misc_feature (702)..(702): n is a, c, g, or t
  misc_feature (715)..(715): n is a, c, g, or t
  misc_feature (726)..(726): n is a, c, g, or t
  misc_feature (746)..(746): n is a, c, g, or t
  nbla-11763-r
ttggtggcctttttttttttttttttaaaattttttttcccattcttgagttttacaatgtctcctatccaaacttcaaatttcattagagccggctacatttgttttagtgccagatacaggtatcaagtgatgacagacacttacgtgaggtatacaatcaattaaagactggaaattggggtattatcatgtaagacatttgagaggccaaaagtcatataattttaagatacttcatgatgttacagtaataattcatctatataacaattattttgacataagtggcatatcagaatttaacttatttacttagatcttaaggaatattagatgtattctcacatgaacactcaaatcatgctattattatcagtcactgggagaacagccaaagtaatcaggcagtctaaggcacatatagacccaataatttagaaattttcaccattatgaggtccctgtttttaataaatatgacaataacaggcgcttgaaatgggggcaaggtgaataagtatccagtcaattgnatacttttataaagtagtgnatttgagacataaactgagatcaaaangaatttncttactttnaaaaaaggngcttctatcttagnagattcttttaaatacttancntatattnaaaagtagtcnttacatacttaagaaatcaccgtaatctaaaaaantaaangcagtttcttggnaatgaacctgngatccaacaggccacaatgngggaattactcag

SEQ ID NO: 322 - DNA, 778 bp, Homo sapiens
  misc_feature (4)..(7): n is a, c, g, or t
  misc_feature (10)..(17): n is a, c, g, or t
  misc_feature (28)..(28): n is a, c, g, or t
  misc_feature (526)..(526): n is a, c, g, or t
  misc_feature (582)..(582): n is a, c, g, or t
  misc_feature (649)..(649): n is a, c, g, or t
  misc_feature (658)..(658): n is a, c, g, or t
  misc_feature (696)..(697): n is a, c, g, or t
  misc_feature (713)..(713): n is a, c, g, or t
  misc_feature (720)..(720): n is a, c, g, or t
  misc_feature (734)..(734): n is a, c, g, or t
  misc_feature (743)..(743): n is a, c, g, or t
  misc_feature (747)..(748): n is a, c, g, or t
  misc_feature (766)..(766): n is a, c, g, or t
  misc_feature (777)..(777): n is a, c, g, or t
  nbla-11767-f
gttnnnnttnnnnnnnntttgaattccnttagcactgttggcctactgggagagaccacacgtagagctcggtcaccaaggaatgcccaacatccctttacctctcacaatgagcagccacgctcaccgggaagcagtgtggggacttcagtggggtgtcccttagtggagaacacctttcatcatttttatagagacaattcccttgagaatgtaggcttttcatcttaggaacaattaggaagaatctccagctgggagtgttcttatgtatacagaaacaatgggtcgcattggttcatacttaggtgatattaggtttggctatattgatgtttggtgccacttaccttctagattttcccaaaagttgggtcattgctatgggaaattggggcctgcagatgggggaggaatgatcattattggtgcagggaaggggttcaggcagagctggagtctgaggctcagtgtgagaaagcactggcagttttctagtagagtcaggtcctgggctcctctcctnacccactgtgtccgaactgaggccagctgtgatcggcaaattgcttatctctaggnaggttaaagaaaacgtaagaatttggggggtggtgggagaataactgtagaaagacctaaactcttntttccccancaaattatcttggataatggttaaaaaccccaaggccnnacttcccttttaccgngaatcanaaggaggatggcantgggcccanggcnnaatggcccactttgaacncattttaaaang

SEQ ID NO: 323 - DNA, 800 bp, Homo sapiens
  misc_feature (2)..(2): n is a, c, g, or t
  misc_feature (6)..(6): n is a, c, g, or t
  misc_feature (9)..(11): n is a, c, g, or t
  misc_feature (30)..(30): n is a, c, g, or t
  misc_feature (35)..(35): n is a, c, g, or t
  misc_feature (42)..(42): n is a, c, g, or t
  misc_feature (80)..(81): n is a, c, g, or t
  misc_feature (83)..(90): n is a, c, g, or t
  misc_feature (92)..(95): n is a, c, g, or t
  misc_feature (97)..(106): n is a, c, g, or t
  misc_feature (110)..(120): n is a, c, g, or t
  misc_feature (123)..(125): n is a, c, g, or t
  misc_feature (130)..(133): n is a, c, g, or t
  misc_feature (149)..(149): n is a, c, g, or t
  misc_feature (153)..(155): n is a, c, g, or t
  misc_feature (158)..(159): n is a, c, g, or t
  misc_feature (162)..(162): n is a, c, g, or t
  misc_feature (165)..(165): n is a, c, g, or t
  misc_feature (171)..(171): n is a, c, g, or t
  misc_feature (177)..(177): n is a, c, g, or t
  misc_feature (180)..(180): n is a, c, g, or t
  misc_feature (184)..(184): n is a, c, g, or t
  misc_feature (195)..(195): n is a, c, g, or t
  misc_feature (200)..(200): n is a, c, g, or t
  misc_feature (216)..(216): n is a, c, g, or t
  misc_feature (223)..(227): n is a, c, g, or t
  misc_feature (232)..(232): n is a, c, g, or t
  misc_feature (236)..(236): n is a, c, g, or t
  misc_feature (238)..(238): n is a, c, g, or t
  misc_feature (240)..(240): n is a, c, g, or t
  misc_feature (242)..(242): n is a, c, g, or t
  misc_feature (245)..(245): n is a, c, g, or t
  misc_feature (251)..(251): n is a, c, g, or t
  misc_feature (257)..(258): n is a, c, g, or t
  misc_feature (260)..(261): n is a, c, g, or t
  misc_feature (264)..(264): n is a, c, g, or t
  misc_feature (270)..(270): n is a, c, g, or t
  misc_feature (276)..(276): n is a, c, g, or t
  misc_feature (281)..(282): n is a, c, g, or t
  misc_feature (284)..(284): n is a, c, g, or t
  misc_feature (287)..(287): n is a, c, g, or t
  misc_feature (300)..(300): n is a, c, g, or t
  misc_feature (304)..(304): n is a, c, g, or t
  misc_feature (308)..(311): n is a, c, g, or t
  misc_feature (314)..(314): n is a, c, g, or t
  misc_feature (318)..(319): n is a, c, g, or t
  misc_feature (330)..(332): n is a, c, g, or t
  misc_feature (337)..(339): n is a, c, g, or t
  misc_feature (341)..(341): n is a, c, g, or t
  misc_feature (344)..(344): n is a, c, g, or t
  misc_feature (348)..(348): n is a, c, g, or t
  misc_feature (350)..(350): n is a, c, g, or t
  misc_feature (362)..(362): n is a, c, g, or t
  misc_feature (364)..(365): n is a, c, g, or t
  misc_feature (369)..(369): n is a, c, g, or t
  misc_feature (371)..(371): n is a, c, g, or t
  misc_feature (378)..(378): n is a, c, g, or t
  misc_feature (380)..(383): n is a, c, g, or t
  misc_feature (385)..(385): n is a, c, g, or t
  misc_feature (397)..(397): n is a, c, g, or t
  misc_feature (402)..(402): n is a, c, g, or t
  misc_feature (409)..(410): n is a, c, g, or t
  misc_feature (413)..(415): n is a, c, g, or t
  misc_feature (417)..(417): n is a, c, g, or t
  misc_feature (421)..(421): n is a, c, g, or t
  misc_feature (423)..(423): n is a, c, g, or t
  misc_feature (425)..(426): n is a, c, g, or t
  misc_feature (428)..(430): n is a, c, g, or t
  misc_feature (445)..(446): n is a, c, g, or t
  misc_feature (460)..(461): n is a, c, g, or t
  misc_feature (464)..(464): n is a, c, g, or t
  misc_feature (469)..(470): n is a, c, g, or t
  misc_feature (472)..(472): n is a, c, g, or t
  misc_feature (476)..(477): n is a, c, g, or t
  misc_feature (479)..(480): n is a, c, g, or t
  misc_feature (483)..(483): n is a, c, g, or t
  misc_feature (492)..(492): n is a, c, g, or t
  misc_feature (506)..(509): n is a, c, g, or t
  misc_feature (518)..(519): n is a, c, g, or t
  misc_feature (521)..(521): n is a, c, g, or t
  misc_feature (523)..(525): n is a, c, g, or t
  misc_feature (528)..(528): n is a, c, g, or t
  misc_feature (530)..(531): n is a, c, g, or t
  misc_feature (533)..(533): n is a, c, g, or t
  misc_feature (539)..(539): n is a, c, g, or t
  misc_feature (542)..(543): n is a, c, g, or t
  misc_feature (551)..(551): n is a, c, g, or t
  misc_feature (554)..(554): n is a, c, g, or t
  misc_feature (562)..(563): n is a, c, g, or t
  misc_feature (565)..(566): n is a, c, g, or t
  misc_feature (569)..(570): n is a, c, g, or t
  misc_feature (574)..(574): n is a, c, g, or t
  misc_feature (582)..(582): n is a, c, g, or t
  misc_feature (584)..(585): n is a, c, g, or t
  misc_feature (588)..(588): n is a, c, g, or t
  misc_feature (594)..(594): n is a, c, g, or t
  misc_feature (596)..(597): n is a, c, g, or t
  misc_feature (599)..(599): n is a, c, g, or t
  misc_feature (601)..(602): n is a, c, g, or t
  misc_feature (605)..(605): n is a, c, g, or t
  misc_feature (609)..(609): n is a, c, g, or t
  misc_feature (615)..(615): n is a, c, g, or t
  misc_feature (621)..(621): n is a, c, g, or t
  misc_feature (623)..(623): n is a, c, g, or t
  misc_feature (626)..(627): n is a, c, g, or t
  misc_feature (633)..(633): n is a, c, g, or t
  misc_feature (636)..(638): n is a, c, g, or t
  misc_feature (642)..(643): n is a, c, g, or t
  misc_feature (647)..(647): n is a, c, g, or t
  misc_feature (651)..(651): n is a, c, g, or t
  misc_feature (653)..(653): n is a, c, g, or t
  misc_feature (655)..(655): n is a, c, g, or t
  misc_feature (661)..(661): n is a, c, g, or t
  misc_feature (663)..(664): n is a, c, g, or t
  misc_feature (670)..(670): n is a, c, g, or t
  misc_feature (672)..(672): n is a, c, g, or t
  misc_feature (674)..(674): n is a, c, g, or t
  misc_feature (676)..(676): n is a, c, g, or t
  misc_feature (681)..(684): n is a, c, g, or t
  misc_feature (686)..(686): n is a, c, g, or t
  misc_feature (689)..(689): n is a, c, g, or t
  misc_feature (691)..(691): n is a, c, g, or t
  misc_feature (694)..(694): n is a, c, g, or t
  misc_feature (696)..(696): n is a, c, g, or t
  misc_feature (704)..(704): n is a, c, g, or t
  misc_feature (706)..(706): n is a, c, g, or t
  misc_feature (716)..(716): n is a, c, g, or t
  misc_feature (718)..(718): n is a, c, g, or t
  misc_feature (724)..(725): n is a, c, g, or t
  misc_feature (727)..(727): n is a, c, g, or t
  misc_feature (730)..(730): n is a, c, g, or t
  misc_feature (732)..(732): n is a, c, g, or t
  misc_feature (739)..(739): n is a, c, g, or t
  misc_feature (741)..(741): n is a, c, g, or t
  misc_feature (747)..(747): n is a, c, g, or t
  misc_feature (753)..(753): n is a, c, g, or t
  misc_feature (756)..(757): n is a, c, g, or t
  misc_feature (759)..(759): n is a, c, g, or t
  misc_feature (762)..(762): n is a, c, g, or t
  misc_feature (768)..(768): n is a, c, g, or t
  misc_feature (770)..(770): n is a, c, g, or t
  misc_feature (772)..(772): n is a, c, g, or t
  misc_feature (774)..(775): n is a, c, g, or t
  misc_feature (777)..(777): n is a, c, g, or t
  misc_feature (784)..(786): n is a, c, g, or t
  misc_feature (791)..(791): n is a, c, g, or t
  misc_feature (793)..(795): n is a, c, g, or t
  nbla-11767-r1
gnaggngannnttggtggcctttgaaaccntttgnttttttntttttttttttttttttttttttttttttttttttttnntnnnnnnnntnnnntnnnnnnnnnngggnnnnnnnnnnnggnnnggggnnnngggggggggggggggnaccnnnggnnggnaanggcaanagaaanaancccncaaaacccccnggggnggggggggaaaacccnggggggnnnnnaaagnaaancnananggnaggggnggcccnnannaanaaaaanggaaanccaanncnccncaaaccccccccncaancccnnnnaanccanncaaaaaaaaannnaaaannncnccnaaananaaccccaaaaancnnaccncngaacccnannnncnccccccccaaanggganccaaagnnaannncnaacncnanngnnngggacacccaacccnngcggggggggcaannccnccccnngngggnngnntanaaaaaaccncaaaccggaacccnnnngcccccccnnangnnnccncnnanacaccnganngggcaccnccnaaaacctnngnnccnnaggnaccaaagnannggncccctncnngnanncgngccncccccnaggttnanaannaaaccncannnaaannaaanaaananancccctntnnctcaancngngnccggnnnnanccnanccncnaacccaangnctcacccccngngcccgnnanccngnacaccananccaccntagggnggnncnacnccaacnancngnncngtcaaannncgcgncnnnagccg

SEQ ID NO: 324 - DNA, 783 bp, Homo sapiens
  misc_feature (2)..(3): n is a, c, g, or t
  misc_feature (5)..(5): n is a, c, g, or t
  misc_feature (9)..(13): n is a, c, g, or t
  misc_feature (26)..(26): n is a, c, g, or t
  misc_feature (28)..(33): n is a, c, g, or t
  misc_feature (600)..(600): n is a, c, g, or t
  misc_feature (672)..(672): n is a, c, g, or t
  misc_feature (737)..(737): n is a, c, g, or t
  misc_feature (744)..(744): n is a, c, g, or t
  misc_feature (780)..(780): n is a, c, g, or t
  nbla-11775-r1
gnntnttgnnnnntgggtggcctttngnnnnnnctttttatcctgtcatttagcatttaataacaaaactatacagaattatgtgcataccaatgaatgttttgtaccatctagttaaattttttaaataaagttttatgggttaagcagaagacaactgtcatactgaattttattaaaagtatatatacttcaaattcaaagcatcccttaggacccacagaatatattaaaactaccacccttaaattttatatttttgctttaagacagacaatgcaaaggtaactggcaagaggtgagcaaatgttttagaacatttatattattgcttaaaatgagatttgaaattgtaataaaattcttggttatgaagtctgatgtcttctttgagcaccagtttaaaaggaaacatttcaaacagtaaaataaatcagtgtgtactttattttgagccaatgttttacataagaccaacaaactaagtgtgggcaaactgttcaatcacttttgagaaattacatggttcctatttaggtttgaaaaagtagtttgttgccataacatcagaccttaaggtgttttaaagtgtatcctaanggtctgacagaagaaaaatacagggtatggaagtatcccaactcatgccacacagtatagatcattcatggngaataatggtcatctggtctccaaaggtagtggaaaatattaagtcatcaaataatgctcagaantaccaanggacaggttaaaaaggaccaggatccaaacaggttnttt

SEQ ID NO: 325 - DNA, 2676 bp, Homo sapiens
  nbla-11778
taggcctgtacggaagtgttacttctgctctaaaagctgcggaattcctcgagcactgttggcctactggcactgtctggaaaacttgaattattttacgccgtgaaagaaaaaggaaaaaaaaaaaatcttttctgttcctagaaaatctgaagtactgtgtttctccgctagagggcagactgctaatgaaatttcaggaccctcactgactgcagtagcaggattgttcagtactgagtggatgggttagggtgtctgtgaacaagatctagcccacacagaaacaggggatttattccacagttagcaccacagattgcgacttgggaagaaaccatcagctagaggggtctagttcgtatccaatcattattgactgactgactgatactcaactagcaaaggcaagaatttggaagcacgctctacccagatgggactttggagttccttcccttccagagtccttattgaggtgttgaagtgttggcatgccgaagaatcttagtgacatttagccatgggtgtttctttaaaaaaggaaaagaaaatgtctcaacgaagctttgaaatgggagagtgttgatttctagttacattgctgggttatgtagttgtatctgtggctaatttttctagtcctcaacaaatacacagacatgctattatggggtttaattcaatttacaaataggttttccttcctcacagtggagtaatagaaaaaattgattttctgctcctttgcagctgtgtccagagacggacaatgaatccacaatttattaggcagaggcacaacttctccaccattcgttttatccttctcttttctctgtttccctccacctctcttcttcttctttcacactgagcagaaaacatatcttcaaaatgaattcgcctttgccatgtgcatattctcttccttaaaaggacatcaacagtgttggagatgaggagatgaacattagattttggaatttctgggagggagagggttaggggtgactcagggcctcccttcgcccaaaggtgaatcagaaaaggcacccctttctctgggatacaacctgagcaggggtctcagctggcaagtggagcagggtgggggctcaacctcctcaccgcttgatcagctgccgttgtacagagcatgacctgtataaccttgagggcagccctgggtagatctgcagagtgaccctctatatagttagaatccagatgaaggccataagaaatagtccatgccatgccgttaggcccactttcatgtgcagtacttgagaaagcacatcgtagcctccttttcagacacacaaatggcggctggactgagagcatggcagagaaggggaggaggagaatgtactaaacttgctcactgaattgagcttgagttattagattgtagaagagcttgatgtctggtgattttgttacaggaagggggtcccgatccagaccccaagagagggctcttggatctcatgcaagaaagaattcagggtgagtccataaagtaaagtgaaagcaagtttattaagaaagtaaaggaaggaaagaatggctaccccatagtcaaagcagctctgagggctgctggttgcccatttttatgtttatttcttgatatgctaaacaaggggtggattattcatgcctcccccttttagatcatatagggtaacttcctgatgttgccatggcatttgtaaaccgtcatggcactggtggtagtatagcagcgaggacaaccagaggtcactctcgttgccatcttggttttggtgggttttagccaacttctttactgcaacctgttttatcagaaggtctttatgacctatatcttgtgctgacctcctgtctcatcctgtgactcagaatgctttagccatctgggaatgcagcccagtaggtctcagcctcattttacccagctcccattcaagatggagttgctctggttcaaatgcctctgacaggttcagcacctgagaaaagtaccttgaatcaggccttggggcagagtcttcaagattttaaggtgatagggcctgtctcttaagaatttattaatcgtaagtgctcactgctggtttagagttagatacatttccctcaaaacggccatgggcaggttatgtactcagaactgccagggtgaaaacaatgagatccagaaaaatcccacaacaatccaggtttttcactcctcttttttttctcaatcttccgatacttgtggtacctcttccatcaacagatacctcatgtagtgacttccagtatcaagttttcaaaacttcctacccaccctcatcagtgcctccttcactacagagtcacaaacattggtgctctcaaataaaaatcagccccaaacaatgtcaaagagatcccttgagtagttttcaggcgagagatatgttctcatttcaagtcttggagaaaactggatccatgttcacgtggaacttctctcgcggaggtgctatctcattttgcattaaactttaagcaggacagattgctgaagccatgatatttaaggtttgactttttaaaaatctcattactcttaaaataaatgctgccacatcagaaaaaaaaaaaaaaaaaaaaaaaaaaaaaaaaaaaaaaaggccacatgtgctcgagctgcag

SEQ ID NO: 326 - DNA, 792 bp, Homo sapiens
  misc_feature (258)..(258): n is a, c, g, or t
  misc_feature (403)..(403): n is a, c, g, or t
  misc_feature (406)..(406): n is a, c, g, or t
  misc_feature (421)..(421): n is a, c, g, or t
  misc_feature (430)..(430): n is a, c, g, or t
  misc_feature (434)..(434): n is a, c, g, or t
  misc_feature (438)..(438): n is a, c, g, or t
  misc_feature (445)..(445): n is a, c, g, or t
  misc_feature (447)..(447): n is a, c, g, or t
  misc_feature (456)..(456): n is a, c, g, or t
  misc_feature (463)..(464): n is a, c, g, or t
  misc_feature (474)..(474): n is a, c, g, or t
  misc_feature (482)..(482): n is a, c, g, or t
  misc_feature (489)..(489): n is a, c, g, or t
  misc_feature (495)..(495): n is a, c, g, or t
  misc_feature (500)..(500): n is a, c, g, or t
  misc_feature (503)..(503): n is a, c, g, or t
  misc_feature (505)..(505): n is a, c, g, or t
  misc_feature (511)..(511): n is a, c, g, or t
  misc_feature (515)..(517): n is a, c, g, or t
  misc_feature (519)..(519): n is a, c, g, or t
  misc_feature (521)..(521): n is a, c, g, or t
  misc_feature (524)..(525): n is a, c, g, or t
  misc_feature (531)..(531): n is a, c, g, or t
  misc_feature (537)..(537): n is a, c, g, or t
  misc_feature (539)..(542): n is a, c, g, or t
  misc_feature (545)..(545): n is a, c, g, or t
  misc_feature (556)..(556): n is a, c, g, or t
  misc_feature (559)..(559): n is a, c, g, or t
  misc_feature (562)..(562): n is a, c, g, or t
  misc_feature (572)..(572): n is a, c, g, or t
  misc_feature (576)..(576): n is a, c, g, or t
  misc_feature (580)..(580): n is a, c, g, or t
  misc_feature (589)..(593): n is a, c, g, or t
  misc_feature (597)..(597): n is a, c, g, or t
  misc_feature (602)..(602): n is a, c, g, or t
  misc_feature (607)..(607): n is a, c, g, or t
  misc_feature (616)..(617): n is a, c, g, or t
  misc_feature (622)..(622): n is a, c, g, or t
  misc_feature (627)..(627): n is a, c, g, or t
  misc_feature (629)..(629): n is a, c, g, or t
  misc_feature (632)..(632): n is a, c, g, or t
  misc_feature (638)..(638): n is a, c, g, or t
  misc_feature (640)..(640): n is a, c, g, or t
  misc_feature (642)..(642): n is a, c, g, or t
  misc_feature (644)..(644): n is a, c, g, or t
  misc_feature (654)..(656): n is a, c, g, or t
  misc_feature (660)..(660): n is a, c, g, or t
  misc_feature (664)..(664): n is a, c, g, or t
  misc_feature (667)..(667): n is a, c, g, or t
  misc_feature (672)..(673): n is a, c, g, or t
  misc_feature (683)..(685): n is a, c, g, or t
  misc_feature (689)..(693): n is a, c, g, or t
  misc_feature (698)..(700): n is a, c, g, or t
  misc_feature (705)..(706): n is a, c, g, or t
  misc_feature (708)..(708): n is a, c, g, or t
  misc_feature (710)..(710): n is a, c, g, or t
  misc_feature (714)..(714): n is a, c, g, or t
  misc_feature (716)..(716): n is a, c, g, or t
  misc_feature (719)..(719): n is a, c, g, or t
  misc_feature (722)..(723): n is a, c, g, or t
  misc_feature (726)..(727): n is a, c, g, or t
  misc_feature (734)..(735): n is a, c, g, or t
  misc_feature (738)..(739): n is a, c, g, or t
  misc_feature (741)..(743): n is a, c, g, or t
  misc_feature (746)..(746): n is a, c, g, or t
  misc_feature (750)..(750): n is a, c, g, or t
  misc_feature (754)..(756): n is a, c, g, or t
  misc_feature (759)..(759): n is a, c, g, or t
  misc_feature (761)..(761): n is a, c, g, or t
  misc_feature (765)..(765): n is a, c, g, or t
  misc_feature (767)..(767): n is a, c, g, or t
  misc_feature (772)..(774): n is a, c, g, or t
  misc_feature (778)..(778): n is a, c, g, or t
  misc_feature (784)..(784): n is a, c, g, or t
  misc_feature (789)..(789): n is a, c, g, or t
  nbla-11822-f
ctcggcactgttggcctactggctgactacctagatgattttgcattaatataataaccattacctgccttagtgctttgtacagtattgtggcaaaatagctaagcctaaaggagttatacaaaaagcagaattccataatgaaacagaattttactttccacataaatagcatgctttttttttttattttttttaagaccgaaatattatatcagaagtgtgttttctttcctgtatgatagttacttgcatggnacctggttggttcattttgttttgtttttttaataccatggagaaatagaagctttctaacttttctgtttgccaatacatctgttgtatccattgacttgtaattatgaaaacttgttttccacagggggcctgaggtgatgangcntaattttcttctatncaggctagnttgnatangggcatnanaaactcggnctagttnntatttttttnctcctctntctcttnaatggntgctnatntnctctgnctgnnntngncgnnactttntgggancnnnntanttcaaatttgnagntgntccggttatntgcnttanccagtggannnnngccntcctngtcangcttgtacnnaagtncaggncntgnatgctngncngntctctaattnnntggncccnttncatgnngtttttcggnnngcannnnntaagnnnttttnntntngcantncantanntgnntccgcannatnntnnngcngttnttcnnnatncntttntntttcnnnctcncagtanttcgngac

SEQ ID NO: 327 - DNA, 807 bp, Homo sapiens
  misc_feature (1)..(2): n is a, c, g, or t
  misc_feature (5)..(8): n is a, c, g, or t
  misc_feature (26)..(28): n is a, c, g, or t
  misc_feature (30)..(30): n is a, c, g, or t
  misc_feature (56)..(56): n is a, c, g, or t
  misc_feature (189)..(189): n is a, c, g, or t
  misc_feature (247)..(247): n is a, c, g, or t
  misc_feature (249)..(249): n is a, c, g, or t
  misc_feature (252)..(252): n is a, c, g, or t
  misc_feature (289)..(289): n is a, c, g, or t
  misc_feature (305)..(305): n is a, c, g, or t
  misc_feature (343)..(343): n is a, c, g, or t
  misc_feature (361)..(361): n is a, c, g, or t
  misc_feature (367)..(367): n is a, c, g, or t
  misc_feature (370)..(370): n is a, c, g, or t
  misc_feature (430)..(430): n is a, c, g, or t
  misc_feature (433)..(433): n is a, c, g, or t
  misc_feature (475)..(475): n is a, c, g, or t
  misc_feature (495)..(495): n is a, c, g, or t
  misc_feature (559)..(559): n is a, c, g, or t
  misc_feature (575)..(575): n is a, c, g, or t
  misc_feature (577)..(577): n is a, c, g, or t
  misc_feature (665)..(665): n is a, c, g, or t
  misc_feature (670)..(670): n is a, c, g, or t
  misc_feature (683)..(683): n is a, c, g, or t
  misc_feature (694)..(694): n is a, c, g, or t
  misc_feature (703)..(703): n is a, c, g, or t
  misc_feature (710)..(710): n is a, c, g, or t
  misc_feature (717)..(717): n is a, c, g, or t
  misc_feature (722)..(722): n is a, c, g, or t
  misc_feature (783)..(783): n is a, c, g, or t
  misc_feature (805)..(805): n is a, c, g, or t
  nbla-11822-r1
nnagnnnntttgtggccttttttttnnncntttttttttttttttttttttttcanatttcatgccttctaccttaacctccttgagataacaacattcatttctgatgttttctgtgctacagggttcatgccttaactgggagttcaagctaattcttgatttctttctcaaaagacgatttaaatntaaggcaaaaaaaaaaaaaaaaatttccgatactgtaactaccttaactgtttgagtntntanaaatgagtatgttttatgagttaacaatgaatcatanaaggcaatttatgaanaactagaatgattctgtctagctgccttcagggatcanaaattcaaattaaacttntggcanacntttaaagaatgctagcatacaaaactgaatttaaaaaaacgcacacagttaacactcctnagnggagtttcaagaggaaatcatgaattaaaaaaacacacggcntgatacactgttgactgatnccaactgggtgtggtcagatcccaggtgcacccaaacctgcgggaatggcagaaatacagctgngcttggccatcacagntntgctagtatggcctgctgtaccttaataccagcaactgggaaaacggtgttagcactaaaactggtggtaaaagcccatacccactgntgggnaaatctgcctganacgggtttttntttaaaaangactctntatcatntgaanctgaaagacttttaaaatatatgccctattatttcctttaacccccaatggggaaacgtanatgatgggaagggaaaaatttnaa

SEQ ID NO: 328 - DNA, 835 bp, Homo sapiens
  misc_feature (2)..(3): n is a, c, g, or t
  misc_feature (5)..(6): n is a, c, g, or t
  misc_feature (10)..(13): n is a, c, g, or t
  misc_feature (16)..(16): n is a, c, g, or t
  misc_feature (19)..(20): n is a, c, g, or t
  misc_feature (26)..(26): n is a, c, g, or t
  misc_feature (725)..(725): n is a, c, g, or t
  misc_feature (741)..(741): n is a, c, g, or t
  misc_feature (773)..(773): n is a, c, g, or t
  misc_feature (800)..(800): n is a, c, g, or t
  misc_feature (834)..(834): n is a, c, g, or t
  nbla-11860-f
gnngnnttgnnnnccnttnntttgantcctcgagcactgttggcctactgggctatatcgaaggtttttcccccagcagtatgggggccgtacaggtgatcgatcattaatgtcattgcaattgttattttttaaaataaatttataaaaataaccgaaaagtaatgtgacttttgaggaatctgcaactcctgggttctagtttgtgtttccggtgttgaaattttgatctcccccgacaagacttgtctgcatggacggtgtctctgtaaacagtatcaaacttgtaatgtctgagcctcttagctttatctccccttaatttcttcccttttggcccttccaccctgttgaggagattttttctgtcacctgcaggctgatcatacatttgatgctactactgaaagtgtttatcaaaatgtgatgaagtaattccatgaggaaaattagccgttatcacaaaaacagccttaagtattgtagaatttcaggtagtgaagatgtactatttacgttttgttagattttgttttggcagaagaccaaaacaaaagtacttttctgattgttaaaaatccacagcatgctcaccttggtactggtttaccttacggtcgctgggaatctaagcaacaaagactagaagcctccgatatgccattatcaacacacaagagacaaacagcccgaggaacactcaatgatgagagcagtagacctgncctgcagatgaaagangagaactctccacaatggaaggaaaacactgncggatttgatagctttaagcaaactgngcttgagttggcttaaattatcccgtggacctgnc

SEQ ID NO: 329 - DNA, 849 bp, Homo sapiens
  misc_feature (2)..(3): n is a, c, g, or t
  misc_feature (6)..(7): n is a, c, g, or t
  misc_feature (11)..(12): n is a, c, g, or t
  misc_feature (18)..(18): n is a, c, g, or t
  misc_feature (29)..(31): n is a, c, g, or t
  misc_feature (627)..(627): n is a, c, g, or t
  misc_feature (632)..(632): n is a, c, g, or t
  misc_feature (676)..(676): n is a, c, g, or t
  misc_feature (680)..(680): n is a, c, g, or t
  misc_feature (708)..(708): n is a, c, g, or t
  misc_feature (753)..(753): n is a, c, g, or t
  misc_feature (777)..(777): n is a, c, g, or t
  misc_feature (790)..(790): n is a, c, g, or t
  misc_feature (795)..(795): n is a, c, g, or t
  misc_feature (807)..(807): n is a, c, g, or t
  misc_feature (812)..(812): n is a, c, g, or t
  misc_feature (824)..(824): n is a, c, g, or t
  misc_feature (833)..(833): n is a, c, g, or t
  misc_feature (842)..(842): n is a, c, g, or t
  misc_feature (847)..(847): n is a, c, g, or t
  nbla-11860-r1
gnntgnnagtnnatttgnggcctttgaannnccctttgttagaagagaatactttattttgaaataaaatacaaatgtgcaaaggaaattagctcctcctgccccccctttgaacaatgagtcaatagaatgtgagactgggtagattagcagataataggcaaaggtctagcttttcagtggcaacttgaagaaaccaaagatgaatgatgctaaaggaatgaccctttggtacctgttttaaagtacttctggcccccttcttttataaacccccaggagcccagcaccacaccttgttaccctacaatgatcactcacgctccacgatgtcactaatgtaataactgaagatatgggccagtttgtccatgtcacgttccgacttgtaggtcagggtgaacctgtccattaatgctgtaaaccctgaccaacaaagcagaaattacgatgttaactccaaatcctaaactttttggcccctttctccccacacatcaggccagtgtaaaggaaacagatcccttcaagctgagtaattcctttatccattaacatggtgtaacttagaaactactaagggccaggttggttgctgctgccactgggaatccaaaggccaccctntctgntttcaagagctggagatggtgcccttttcatctggagccagctntttnccctactctcttaagctgcctaactatnggaaacaataggatccctcctaatgtcttggctagagaaccactnacacagtgagggcaggcacctggnattacccatcttnatatncctggcacagantaagnttttggtaaatnaacgacttncggagtggnttgtnat

SEQ ID NO: 330 - DNA, 885 bp, Homo sapiens
  misc_feature (2)..(5): n is a, c, g, or t
  misc_feature (10)..(13): n is a, c, g, or t
  misc_feature (17)..(17): n is a, c, g, or t
  misc_feature (20)..(22): n is a, c, g, or t
  misc_feature (541)..(541): n is a, c, g, or t
  misc_feature (660)..(660): n is a, c, g, or t
  misc_feature (720)..(720): n is a, c, g, or t
  misc_feature (801)..(801): n is a, c, g, or t
  misc_feature (808)..(808): n is a, c, g, or t
  misc_feature (815)..(816): n is a, c, g, or t
  misc_feature (818)..(818): n is a, c, g, or t
  misc_feature (840)..(840): n is a, c, g, or t
  misc_feature (852)..(852): n is a, c, g, or t
  misc_feature (857)..(857): n is a, c, g, or t
  misc_feature (864)..(864): n is a, c, g, or t
  misc_feature (867)..(867): n is a, c, g, or t
  misc_feature (869)..(869): n is a, c, g, or t
  misc_feature (875)..(877): n is a, c, g, or t
  nbla-11874-f
gnnnntttgnnnncccnttnnnttgaattccccgtgcctgttggcctactggttgatgcaataccaaagtgcttcccagagaggctgtgccaatgtgtgctccctcccctcccacgggtgagagtgcccatccactgtatccatactggtgctgagtgctatcattacttgacatctttgccattttattaaagagcatatggctggttgctaaaggtaaggtggcaaacaaaaaaaactgtgaagagaagcagaagtttaaattccagacaataaatgaaaattggtaaaggcatctggttcttctagaaacatccttccattaatttgtagatgagtatctcctatttctaggaggatgtgtcaacatttcacagcctcctagagtattagctgcccctatgcctctctctatatattctcatctggcattaatgcacattagatagggatttggaatgtttaccaccttgttagaacttctgagccatttctaatttctttcctatgctgaaccctccaataaaaagcaagtgactgnttatataatattagagcattttgaggtacctctgcagctaactagtttaaaaatgacaaattaagtcaaagtttgatttgctccatgatctgatggttgcatttcctgagatgtttcanggaactgactaaaaatttgatggagacagtctttgagaatggtctaaaaaactccacganggcatctaattcaaccccttgctctaggacaaaccagccaaacatgaatccatgaggaaggaaacaattttcaattttcantcacagnagttaanngntttgccaaatccccgacaccgntttttcctgacnggggnttgggancangnaataannnggagttgt

SEQ ID NO: 331 - DNA, 888 bp, Homo sapiens
  misc_feature (2)..(4): n is a, c, g, or t
  misc_feature (19)..(20): n is a, c, g, or t
  misc_feature (29)..(29): n is a, c, g, or t
  misc_feature (670)..(670): n is a, c, g, or t
  misc_feature (705)..(705): n is a, c, g, or t
  misc_feature (717)..(717): n is a, c, g, or t
  misc_feature (727)..(727): n is a, c, g, or t
  misc_feature (750)..(750): n is a, c, g, or t
  misc_feature (802)..(802): n is a, c, g, or t
  misc_feature (823)..(823): n is a, c, g, or t
  misc_feature (833)..(833): n is a, c, g, or t
  misc_feature (844)..(844): n is a, c, g, or t
  misc_feature (850)..(850): n is a, c, g, or t
  misc_feature (853)..(853): n is a, c, g, or t
  misc_feature (870)..(870): n is a, c, g, or t
  misc_feature (882)..(882): n is a, c, g, or t
  nbla-11874-r1
gnnntttgaggcccttttnntttttctgnttgtttttttttggttgttaagtctcccatgtttagtaattaacagaccccgccagagaggaacagaacaaaaatgagcatgcaaatgactaatcaaggaaagctggaatcaacaagatatgggtaaaaagatgctcctctgagcctggccatcatgcggcaggttctgcgcctctgatcacactgagctgcccaccttcccatgccctggaggtaaagctatgtagtcctaccctggtagcataggctgtgccactacacaattcagcatttgacttgaacaagaatgggatactttggatacttttttctttaaaatggttccagtctcccaaacacaagtatggttgtatgatgcattttaggaatttatttatcacactgtgaatttccacactgccttcttcataagaattcaaaatgcttgttcacatttctaaggcatctaatggggggcaagtattaaaatgcctccattttacagataaggtaaactgagcaaagtaatttatcccaggtcagaggcaaagcaagtataagccctgttccaatctcaccaagtcataccacctctgcaattcaaaatggctcctttaattttctcaaggtacccaaaaaaaaaacacattttcatatcttgnacaaactaaaaagctctacagtggttctatggcanctgttctttgcnaaagggggtncagtggtagacatctacattttnatctttcatttttataagcaatgctttggtgaacatctctggattttttacnaaggaaatgatgatctttgcncagcaaactnttattaaagcncagggncangcccatatttaacctgntttagccacagnaatttt

SEQ ID NO: 332 - DNA, 885 bp, Homo sapiens
  misc_feature (2)..(6): n is a, c, g, or t
  misc_feature (9)..(14): n is a, c, g, or t
  misc_feature (16)..(22): n is a, c, g, or t
  misc_feature (26)..(26): n is a, c, g, or t
  misc_feature (32)..(32): n is a, c, g, or t
  misc_feature (35)..(35): n is a, c, g, or t
  misc_feature (737)..(737): n is a, c, g, or t
  misc_feature (774)..(774): n is a, c, g, or t
  misc_feature (777)..(777): n is a, c, g, or t
  misc_feature (816)..(816): n is a, c, g, or t
  misc_feature (847)..(847): n is a, c, g, or t
  misc_feature (872)..(872): n is a, c, g, or t
  nbla-11880-f
gnnnnnttnnnnnncnnnnnnnttgnattccncgntcactgttggcctactggagtgtgacaactgatcgggtgaacgatgcaccactaaccaccatggaaacaaggaaaaataaagccagctcacaggatctctcttcactggattgagagcctcagcctgccgactgagaaaaagagttccaggaaaaagaaggaatcccggctgcagcctcctgccttcctttatattttaaaatagagagataagattgcgtgcatgtgtgcatatctatagtatatattttgtacactttgttacacagacacacaaatgcacctatttataccgggcaagaacacaaccatgtgattatctcaaccaaggaactgaggaatccagcacgcaaggacatcggaggtgggctagcactgaaactgcttttcaagacgaggaagaggaggagaaagagaaagaagaggaagatgttgggcaacatttatttaacatgctccacagcccggaccctgcatcatgctgctattcctgcaaatactgaagaagcatgggatttaaatattttacttctaaataaatgaattactcaatctcctatgaccatctatacatactccaccttcaaaaagtcatcaatattatatcattaaggaaatagtaaccttctcttcttcaatatgcatgacattttggacaatgcaattgtggcactgcacttatttcagtgaagaaaaacttgnggtctatggcattcatcatttgacaaatgcaagcatnttncttatcaatcagcttctatggacttactacacttgctgnggaatcctaagggccatacattttgaagaanaagcttagataaggcatgccctccnaattatggcttct

SEQ ID NO: 333 - DNA, 859 bp, Homo sapiens
  misc_feature (624)..(624): n is a, c, g, or t
  misc_feature (666)..(666): n is a, c, g, or t
  misc_feature (686)..(686): n is a, c, g, or t
  misc_feature (693)..(693): n is a, c, g, or t
  misc_feature (784)..(784): n is a, c, g, or t
  misc_feature (791)..(791): n is a, c, g, or t
  misc_feature (818)..(818): n is a, c, g, or t
  misc_feature (826)..(826): n is a, c, g, or t
  misc_feature (830)..(831): n is a, c, g, or t
  misc_feature (844)..(844): n is a, c, g, or t
  misc_feature (856)..(856): n is a, c, g, or t
  nbla-11880-r1
gtggcccttttttttgtttttgttctttttggagtaggtttccttggtggtttttaggacatatttgttggtaaacctataacagttgcttttactttcagtgatgtacttttttcttttcctgcttcccagagatttatcagaggaggataaagctcacctaatgcaaaggttggtttctgtaagtaattcctcacatagctgtgtccaccatcacagttcatttctggagagaggcagctgataagacatatcacaccaataatccccagaaggcctccaagacaggccataagtgttgtggtattattcttttcatactctttttgatcagggtgcaaacctttggtggtgacatttacacatttttttctgtttttctgatagatggtgggaatatcaatacaaattttatactcagttgatggattcagatgagtaagattatataccttgacatcagatggtattcgagcactttgcgcagcatgagaattttcagtcttgacaaaggctgccatttaacactagatttgagaattttagaacttgctttcaggacaccaaaactgaattgcctgaatatctcttattttaatattcaaagagccattggtatcttgnggaaaagaccatccctttgacataacagacttcaagcagcgncaactagggtaggtgctatncagtatntaaaccccttttttgggagtacgcctttatatctagggtccctcaaatggacatagacttgctggcaggtattaggcaaaagtttttgacncgaaggngtatccatagatttcagctggggtctnaagtactntacnngaaaggaacatantccacttttcanttt

SEQ ID NO: 334 - DNA, 2013 bp, Homo sapiens
  nbla-11882
taggcctgtacggaagtgttacttctgctctaaaagctgcggaattcctcgagcactgttggcctactggtcagcaagacacatcagtaccacaagatccaggtgtggccctccagaatccagccggctgtctttgctttcccatgtgctacacttatcactgtgatgttggccttcatcatgtacatgaccctgcggaatgccactcagcaaaaggacatggtggagaacccggagccaccctctggggtcaggtgctgctgccagatgtgctgtgggcctttcttgctggagactccatctgagtacctggaaattgttcgtgagaaccacgggctgctcccgcccctctataagtctgtcaaaacttacaccgtgtgagcactccccctccccaccccatctcagtgttaactgactgctgacttggagtttccagcagggtggtgtgcaccactgaccaggaggggttcatttgcgtggggctgttggcctggatcatccatccatctgtacagttcagccactgccacaagcccctccctctctgtcacccctgaccccagccattcacccatctgtacagtccagccactgacataagccccactcggttaccaccccctcgaccccctacctttgaagaggcttcgtgcaggactttgatgcttggggtgttccgtgttgactcccaggtgggcctggctgcccactgcccattcctctcatattggcacatctgctgtccattgggggttctcagtttcctcccccagacagccctacctgtgccagagagctagaaagaaggtcataaagggttaaaaatccataactaaaggttgtacacatagatgggcacactcacagagagaagtgtgcatgtacacacaccacacacacacacacacacacacacacagagaaatataaacacatgcgtcacatgggcatttcagatgatcagctctgtatctggttaagtcggttgctgggatgcaccctgcactagagctgaaaggaaatttgacctccaagcagccctgacaggttctgggcccgggccctccctttgtgctttgtctctgcagttcttgcgccctttataaggccatcctagtccctgctggctggcagggggctggatggggggcaggactaatactgagtgattgcagagtgctttataaatatcaccttattttatcgaaacccatctgtgaaactttcactgaggaaaaggccttgcagcggtagaagaggttgagtcaaggccgggcgcggtggctcacgcctgtaatcccagcactttgggaggccgaggcgggtggatcacgagatcaggagatcgagaccaccctggctaacacggtgaaaccccgtctctactaaaaaaatacaaaaagttagccgggcgtggtggtgggtgcctgtagtcccagctactcgggaggctgaggcaggagaatggtgcgaacccgggaggcggagcttgcagtgagcccagatggcgccactgcactccagcctgagtgacagagcgagactctgtctccaaaaaaaaaaaaaagaagaggttgagtcagcagggacttgggttccctgtgtgtgaggggggcattcttgcctgccagctgctcccgaggtggccttgagaaggaagaagcaggatgacagagcctgagcagcggaaccagcctgcaccctcccttctggcccagcgacctgggctgtggctgagacaataatgaggccagaagtagccggagcctgtcaggaagggcaggggaggactgtggggtctgggctctgtcgctgtaaccatctgctcccaggctgtgtgcagaaaatggcatttacactattgtgcagctcattctcatgaaatactgccattgttgctaaataaagcttgtgtgctctgaatatagccaagcaaaaaaaaaaaaaaaaaaaaaaaaaaaaaaaaaaaaaaaaaaaaaaaaaaaaaggccacatgtgctcgagctgcag

SEQ ID NO: 335 - DNA, 1907 bp, Homo sapiens
  nbla-11895
taggcctgtacggaagtgttacttctgctctaaaagctgcggaattcctcgagcactgttggcctactgggaactaagctacagccaccagggattttgtggggaagattacctccatactgggaggggcccatgcaatttgcatcaccatagctgccctctccaggagttcttgggagagcaattctgtttaggtacatagcagaagagcaagctcctagagtggaagttaaaggggctgcttaatgtttggtgtgtactttgtgaggttagggaggtaagatgttaaagtcagatgctgctctacttagtatgggatgtcaataaggtacttacttcaaagtaggtactggaacatacctttcttctaagagactaagattttgttgttgttcttcagagaagcatttgtggaatatttctgtagtgcttgaatggccaaagatcaataaacaaaataaattacagtcctggtggattttaatatttaaatttagataattatgatgtccaaagagaagagaaagagatgctttaagtcattaccaaaaatatcttagtccttgagagggatttgctgaaccaaagtgagaatgaagtctgtgtgtccccttttctgcaaagaagctgacgccacatgatgcaaaggcctgcccttaacccagttaatatgaacatggcatggcaccaaagaggagacagaatcgacagggagagtcccagttttaagctcccaagcaagatctttcagtggggatgggaggggtccttttaccctttcctaatgactaaattaaaccaaacctacccaagtggcccctcctctcctcctgggagatggtggtgccattgtcaagataggtgggacacatttgggagagattgggggaacacagtttcaccttcacatttaagaatccaatttactcctgtggccttgtttgaactctccttccaacactcatataataataattatatgtccttgccttctgtaagctcatttcagttggtgtagcaaatatatttctaccacacacacaaaaattcttctcttaggggttcatgtggaaatgaaaacacaatgtgttccactccacgtgaaaagcaagtgctgtctctgcagcaaagtgcttcctgacaaggactgagctgaagtgtcatgaagctactcacctggagggggcatcagcatctcctgcctcttaagtcgaccagggaaagcttggacaagagcagccatgtaggtgttacaggaaaggtcctgatccagacccctagagaacgttcttggatgtcgcgcaagaaagaattcagggtgactccacggtaaaagcaagtttattaagaaagaaaaggaataaaagaatagctactccatggaccagccccgagggctgctggttgcccatttttatggttatttcttggtgatatgctaaacaagggatggattactcatgcctcccctttctagaccatatagggaaacttcctgacattgccatggcctttgtaaactgtcagggtgctggtgggagtgtagcagtgaggatgacctgaggtcactctcgtcaccatcttggttttggtggcttttggccagcttctttactgcaacctgttttatcagcaaggtctttatgacctgtattttgtacaaacctcctatcttatcctgttacttagaatgccttaaccttctgggaatgcagcccagtaggtctcagcctcattttacccagctcctattcaagaccgagttgctctggttcaaatgtctctgacatgggggctaatgacatcagaactggaaagaaagatgataaaggaatgagtttttttttaaaaaaaaaaaaaaaaaaaaaggccacatgtgctcgagctgcaggtcgcggccgctagac

SEQ ID NO: 336 - DNA, 777 bp, Homo sapiens
  misc_feature (3)..(3): n is a, c, g, or t
  misc_feature (5)..(7): n is a, c, g, or t
  misc_feature (18)..(19): n is a, c, g, or t
  misc_feature (653)..(653): n is a, c, g, or t
  misc_feature (678)..(678): n is a, c, g, or t
  misc_feature (757)..(757): n is a, c, g, or t
  nbla-11988-f
gangnnnttgattcctcnngcactgttggcctactggtaattgctattgatgtggagattttgcagaacatggcagagtttttgcgtctttcacaagaaatatataattgaatgatgagtgcctggtgttagcttttcaaccttatttcttttggtttaacaatgcagaattgtgaacagctgcagcaaataggcagctacaatatctagctattatcaaataaatgcagatctggcatatgagctgagctaccacttttggatctgcacctcttgaataaacattctgaagtgtggaagcatgaaaagtgaatgatttgccctgaggtgtttaatcctgccttgcattcttgactgaaattcttcacaattagggtgactaacattaatatgtggccagatgcatttgcacagattgatggattcccccccacccttgatgttcctcgaacaagtggttaaaagtgtgagaggctttaaaggcaaagccacgtgccttcaggtggctgatattttcccaaagaccatcatcaaacttccagccaggtggataatatcatggcacccaaccaggtgtcaacactgaattcacttggcttcaacgaggacctggccataagagagagcaaacaggcctggtttcaagtatccangacctctgctcagatccctcactgnaattcttaagggaagcagcattgtgaaagactggctaggagaaaagagaaggtaatggcaaatatttccttaattctgngactttgggcaagcttactt

SEQ ID NO: 337 - DNA, 829 bp, Homo sapiens
  misc_feature (2)..(3): n is a, c, g, or t
  misc_feature (6)..(11): n is a, c, g, or t
  misc_feature (18)..(19): n is a, c, g, or t
  misc_feature (22)..(22): n is a, c, g, or t
  misc_feature (640)..(640): n is a, c, g, or t
  misc_feature (723)..(723): n is a, c, g, or t
  misc_feature (767)..(767): n is a, c, g, or t
  misc_feature (769)..(769): n is a, c, g, or t
  misc_feature (780)..(780): n is a, c, g, or t
  misc_feature (790)..(790): n is a, c, g, or t
  misc_feature (796)..(796): n is a, c, g, or t
  misc_feature (799)..(799): n is a, c, g, or t
  misc_feature (802)..(802): n is a, c, g, or t
  misc_feature (817)..(817): n is a, c, g, or t
  misc_feature (820)..(820): n is a, c, g, or t
  nbla-11988-r1
gnnagnnnnnntttgaannccntttgttgtggccttttttttttttttttttccccgagacgaagtcttgctctatcttccaggctgcagtgcagtggcacaatctcagctcatggcaacctccccctcccaggttcaagcaattctcttgcctcagcctcccaaagctgggactacaggcatgtgccgccacacccggctcgttttttgtattttagtagagacagggtttcaccatgttgcccaggctggtctcaaactcctgagctcaagcaatccgcccgcctcggcctcccaaagtgctaggattacaggcgtgagtcaccgcacccagccaaatgtccattttcttctggctgtaatcgtaaaggtaactatccactctaaatacatatggctttctgggcagcactgagcaactatatagctatcaactagctgaaagaaggaaacaaaaaatatggccctaggatagaatcagcccttctgtgtcatattcataaggactgtgccggaagcacatgggaacctggtccggaaacccttctttctaaaatgttagcaagacttttttctttggtagttcatcattgcattgtaccagtcacctttctaagctctttagaatcattaactctgngaattctcaataataactctaatgggtgggaagtattgcagcccatttttcaagtagggaaattgaggattgagaagttaacntggccaaagtcccagaattaagggaaaactttggcattaccttntnttttttctaanccagcttttnaaatgntgnttnccttaaaaattgcantgnggggactga

SEQ ID NO: 338 - DNA, 812 bp, Homo sapiens
  misc_feature (2)..(3): n is a, c, g, or t
  misc_feature (5)..(6): n is a, c, g, or t
  misc_feature (9)..(10): n is a, c, g, or t
  misc_feature (12)..(12): n is a, c, g, or t
  misc_feature (37)..(37): n is a, c, g, or t
  misc_feature (533)..(533): n is a, c, g, or t
  misc_feature (561)..(561): n is a, c, g, or t
  misc_feature (714)..(714): n is a, c, g, or t
  misc_feature (720)..(720): n is a, c, g, or t
  misc_feature (740)..(740): n is a, c, g, or t
  misc_feature (748)..(748): n is a, c, g, or t
  misc_feature (750)..(750): n is a, c, g, or t
  misc_feature (772)..(772): n is a, c, g, or t
  misc_feature (776)..(776): n is a, c, g, or t
  misc_feature (778)..(778): n is a, c, g, or t
  misc_feature (790)..(790): n is a, c, g, or t
  misc_feature (792)..(792): n is a, c, g, or t
  misc_feature (804)..(804): n is a, c, g, or t
  misc_feature (807)..(807): n is a, c, g, or t
  nbla-12017-f
gnngnnttnntntgaatccctttgtaagatccctcgngcactgttggcctactggtaggggttggatcctagagtagatgcctgaggccacatctgaacagacctgtcagccaggcctgccaggtcttcacgttgaggattcaactggccaatcacaggacaggtgtcctggcctttcttcctgaggtctctaggggaggggcatgggtaagggtgtttcctcagcaccctcctggggtggggattatgtctgctgtcatgtctgggtctttagggtaggacaggctgtggtatgagaggcaggagtctccacaaggcttcatgtggccccttatagggcaggccctgccctctgggaaggtcccttcatgctggaggcacacagctttaaggaagtaggttgaagtaggactccttcgtcctctcactggctttggctccctcaataaactgtgtgggaacctggctcagtgtctgtctctctctctcactctctggttttcctatctgaggtctttcatctctcacttcangaaaacacaagttcaacaaagtcttcanatgccatcctgtgtaggaagaaaatacccttctggtgccccatgaaaaagggaaataccaaaaccatttggtcactgacctttgcaataaggtgcttccttaccaatttcaaaaagcttcccttgcaagtagatatcgagagagcacactttncattanagcctggtaatacccatatnacctttgntntgaagctgggcctgcaacttgngaancntttggaaaagtnancccttgaccccnaanctaaa

SEQ ID NO: 339 - DNA, 851 bp, Homo sapiens
  misc_feature (2)..(3): n is a, c, g, or t
  misc_feature (5)..(7): n is a, c, g, or t
  misc_feature (11)..(14): n is a, c, g, or t
  misc_feature (17)..(17): n is a, c, g, or t
  misc_feature (20)..(20): n is a, c, g, or t
  misc_feature (45)..(45): n is a, c, g, or t
  misc_feature (116)..(118): n is a, c, g, or t
  misc_feature (121)..(122): n is a, c, g, or t
  misc_feature (126)..(126): n is a, c, g, or t
  misc_feature (129)..(130): n is a, c, g, or t
  misc_feature (133)..(133): n is a, c, g, or t
  misc_feature (137)..(137): n is a, c, g, or t
  misc_feature (141)..(141): n is a, c, g, or t
  misc_feature (148)..(148): n is a, c, g, or t
  misc_feature (151)..(152): n is a, c, g, or t
  misc_feature (156)..(159): n is a, c, g, or t
  misc_feature (161)..(161): n is a, c, g, or t
  misc_feature (164)..(168): n is a, c, g, or t
  misc_feature (171)..(172): n is a, c, g, or t
  misc_feature (175)..(176): n is a, c, g, or t
  misc_feature (181)..(182): n is a, c, g, or t
  misc_feature (184)..(184): n is a, c, g, or t
  misc_feature (186)..(186): n is a, c, g, or t
  misc_feature (190)..(191): n is a, c, g, or t
  misc_feature (194)..(197): n is a, c, g, or t
  misc_feature (202)..(203): n is a, c, g, or t
  misc_feature (206)..(207): n is a, c, g, or t
  misc_feature (211)..(211): n is a, c, g, or t
  misc_feature (214)..(215): n is a, c, g, or t
  misc_feature (218)..(218): n is a, c, g, or t
  misc_feature (227)..(228): n is a, c, g, or t
  misc_feature (241)..(241): n is a, c, g, or t
  misc_feature (244)..(244): n is a, c, g, or t
  misc_feature (247)..(247): n is a, c, g, or t
  misc_feature (250)..(250): n is a, c, g, or t
  misc_feature (253)..(253): n is a, c, g, or t
  misc_feature (255)..(255): n is a, c, g, or t
  misc_feature (257)..(258): n is a, c, g, or t
  misc_feature (260)..(260): n is a, c, g, or t
  misc_feature (262)..(262): n is a, c, g, or t
  misc_feature (265)..(265): n is a, c, g, or t
  misc_feature (268)..(268): n is a, c, g, or t
  misc_feature (270)..(270): n is a, c, g, or t
  misc_feature (273)..(275): n is a, c, g, or t
  misc_feature (277)..(277): n is a, c, g, or t
  misc_feature (280)..(281): n is a, c, g, or t
  misc_feature (284)..(286): n is a, c, g, or t
  misc_feature (292)..(293): n is a, c, g, or t
  misc_feature (305)..(305): n is a, c, g, or t
  misc_feature (310)..(310): n is a, c, g, or t
  misc_feature (314)..(314): n is a, c, g, or t
  misc_feature (318)..(318): n is a, c, g, or t
  misc_feature (320)..(320): n is a, c, g, or t
  misc_feature (324)..(324): n is a, c, g, or t
  misc_feature (327)..(328): n is a, c, g, or t
  misc_feature (331)..(331): n is a, c, g, or t
  misc_feature (334)..(335): n is a, c, g, or t
  misc_feature (337)..(337): n is a, c, g, or t
  misc_feature (343)..(343): n is a, c, g, or t
  misc_feature (350)..(352): n is a, c, g, or t
  misc_feature (354)..(355): n is a, c, g, or t
  misc_feature (357)..(357): n is a, c, g, or t
  misc_feature (360)..(360): n is a, c, g, or t
  misc_feature (365)..(365): n is a, c, g, or t
  misc_feature (370)..(370): n is a, c, g, or t
  misc_feature (374)..(374): n is a, c, g, or t
  misc_feature (377)..(377): n is a, c, g, or t
  misc_feature (382)..(382): n is a, c, g, or t
  misc_feature (385)..(385): n is a, c, g, or t
  misc_feature (398)..(398): n is a, c, g, or t
  misc_feature (400)..(400): n is a, c, g, or t
  misc_feature (404)..(405): n is a, c, g, or t
  misc_feature (411)..(411): n is a, c, g, or t
  misc_feature (417)..(417): n is a, c, g, or t
  misc_feature (427)..(428): n is a, c, g, or t
  misc_feature (435)..(437): n is a, c, g, or t
  misc_feature (445)..(445): n is a, c, g, or t
  misc_feature (448)..(448): n is a, c, g, or t
  misc_feature (450)..(450): n is a, c, g, or t
  misc_feature (453)..(453): n is a, c, g, or t
  misc_feature (456)..(456): n is a, c, g, or t
  misc_feature (459)..(459): n is a, c, g, or t
  misc_feature (461)..(461): n is a, c, g, or t
  misc_feature (463)..(463): n is a, c, g, or t
  misc_feature (469)..(469): n is a, c, g, or t
  misc_feature (471)..(472): n is a, c, g, or t
  misc_feature (477)..(477): n is a, c, g, or t
  misc_feature (492)..(492): n is a, c, g, or t
  misc_feature (498)..(498): n is a, c, g, or t
  misc_feature (500)..(500): n is a, c, g, or t
  misc_feature (502)..(502): n is a, c, g, or t
  misc_feature (508)..(508): n is a, c, g, or t
  misc_feature (510)..(511): n is a, c, g, or t
  misc_feature (515)..(515): n is a, c, g, or t
  misc_feature (521)..(522): n is a, c, g, or t
  misc_feature (525)..(525): n is a, c, g, or t
  misc_feature (528)..(528): n is a, c, g, or t
  misc_feature (531)..(532): n is a, c, g, or t
  misc_feature (545)..(545): n is a, c, g, or t
  misc_feature (557)..(557): n is a, c, g, or t
  misc_feature (561)..(562): n is a, c, g, or t
  misc_feature (564)..(564): n is a, c, g, or t
  misc_feature (569)..(569): n is a, c, g, or t
  misc_feature (572)..(572): n is a, c, g, or t
  misc_feature (574)..(574): n is a, c, g, or t
  misc_feature (580)..(580): n is a, c, g, or t
  misc_feature (598)..(600): n is a, c, g, or t
  misc_feature (607)..(608): n is a, c, g, or t
  misc_feature (614)..(614): n is a, c, g, or t
  misc_feature (642)..(642): n is a, c, g, or t
  misc_feature (648)..(648): n is a, c, g, or t
  misc_feature (658)..(658): n is a, c, g, or t
  misc_feature (661)..(661): n is a, c, g, or t
  misc_feature (666)..(666): n is a, c, g, or t
  misc_feature (676)..(676): n is a, c, g, or t
  misc_feature (680)..(681): n is a, c, g, or t
  misc_feature (683)..(684): n is a, c, g, or t
  misc_feature (688)..(688): n is a, c, g, or t
  misc_feature (693)..(694): n is a, c, g, or t
  misc_feature (709)..(709): n is a, c, g, or t
  misc_feature (713)..(715): n is a, c, g, or t
  misc_feature (718)..(720): n is a, c, g, or t
  misc_feature (730)..(730): n is a, c, g, or t
  misc_feature (745)..(745): n is a, c, g, or t
  misc_feature (762)..(762): n is a, c, g, or t
  misc_feature (772)..(772): n is a, c, g, or t
  misc_feature (786)..(786): n is a, c, g, or t
  misc_feature (809)..(809): n is a, c, g, or t
  misc_feature (820)..(820): n is a, c, g, or t
  misc_feature (823)..(823): n is a, c, g, or t
  misc_feature (843)..(843): n is a, c, g, or t
  misc_feature (848)..(849): n is a, c, g, or t
  nbla-12017-r1
gnngnnnttgnnnnccnttnatttgtggcccttttgatttttccnttttttttttttttttttttttttttttttttttttttttttttttttttttttttttttttttttttttnnnaanntttnttnnttnattntttnttttggnaanngggnnnnanttnnnnnccnnggnnggggnncntnggcnnaannnnggttnnccnnaccnttnnccnccgggcctnnggggacccccccnccnaanccnccngngnngntnggnctncnggnnngngtnnccnnnttgggnnaatttttttttngaaanaaantttngntttngtnnccnaanntngggggnaagggcnnnanntnggntaacnggccnaagntanccttngtncccaagttaaagngntttnncggccnaaaccnttaaaggggnngaaattnnnggcccccnccncnaantcnggntngntttttngnnttttnaaaaaaaatggggtncccccntntnggccangnnggtntaaaannccngtnttnnggggacccccctntttgggcccccnaaanngncgggnttncngggggnaaccattgggcccggccnnnttttggnntttttnggaaaaaaggggttttgccattttgccnagggtnggttaaaacnccnggggntaaaaggganccannanntttnggttnnccaaaagggcttggnattnnnggnnngggccccccnccctagggtgggtantttttttaaaaccgccnttttgcccanaaaaaggccccttnggtggaaaacccttggaaccccnggggggggggnccncttttaaaaacccgccttanggggnnga

SEQ ID NO: 340 - DNA, 768 bp, Homo sapiens
  misc_feature (2)..(2): n is a, c, g, or t
  misc_feature (4)..(4): n is a, c, g, or t
  misc_feature (620)..(620): n is a, c, g, or t
  misc_feature (628)..(628): n is a, c, g, or t
  misc_feature (637)..(637): n is a, c, g, or t
  misc_feature (650)..(650): n is a, c, g, or t
  misc_feature (663)..(663): n is a, c, g, or t
  misc_feature (669)..(669): n is a, c, g, or t
  misc_feature (677)..(677): n is a, c, g, or t
  misc_feature (696)..(696): n is a, c, g, or t
  misc_feature (704)..(704): n is a, c, g, or t
  misc_feature (707)..(707): n is a, c, g, or t
  misc_feature (711)..(711): n is a, c, g, or t
  misc_feature (722)..(722): n is a, c, g, or t
  misc_feature (729)..(730): n is a, c, g, or t
  misc_feature (738)..(738): n is a, c, g, or t
  misc_feature (741)..(741): n is a, c, g, or t
  misc_feature (758)..(758): n is a, c, g, or t
  misc_feature (761)..(762): n is a, c, g, or t
  nbla-12022-f
gntncctcggcctgttggcctactggctacttaagtgtaaacaaggcaagcctcagaccagcaataaattactcagtttggataacattattttgtgcagttaatcaaatttgccaaagtctttatctgcccctttaacaagttgagtaaaaataaaaggtattttttagtcaatgtgttccatgattttgcttaaattaatacttttaagtaatggaacttttttcaaaggcaaatttaaactatttaagaaatagctcctaatacttgggatcttgtttagagaatccactttctggaagttctcagcataattagtgttgagagtggttcagttgtctttaatgtttgtcatgtggaaatggaagtagcctctttttgttctgaaattgagtttattcaaagtgtaaaagcacatactgcattttctgctgaaagatcattatgtttaacaggcacttaatctcagtaaagtcagttgccagttaaagttcccccagtagtcagtcccctttgtagttagtgggattatttgataattgggtagatcatacttgaaaatttaatgctttgggtaattggttggaaaacagtggaattgggaaacgcaaacttttggncctattcnagtaagggnaatggagtcctgnggaacccaattgnatacgnaaatttgnaggagtctaggtacattangccatccntcntaancctggtgagtngaatgcnntttagaangantacctacatcctttggnaanncctaaa

SEQ ID NO: 341 - DNA, 847 bp, Homo sapiens
  misc_feature (2)..(3): n is a, c, g, or t
  misc_feature (6)..(10): n is a, c, g, or t
  misc_feature (19)..(19): n is a, c, g, or t
  misc_feature (31)..(31): n is a, c, g, or t
  misc_feature (597)..(597): n is a, c, g, or t
  misc_feature (629)..(629): n is a, c, g, or t
  misc_feature (649)..(649): n is a, c, g, or t
  misc_feature (733)..(733): n is a, c, g, or t
  misc_feature (735)..(735): n is a, c, g, or t
  misc_feature (748)..(748): n is a, c, g, or t
  misc_feature (771)..(771): n is a, c, g, or t
  misc_feature (783)..(783): n is a, c, g, or t
  misc_feature (824)..(824): n is a, c, g, or t
  misc_feature (829)..(829): n is a, c, g, or t
  misc_feature (835)..(835): n is a, c, g, or t
  nbla-12022-r1
gnnagnnnnnttgtggccntttttttttttnttttccctcagtaagtattttattgagatttaaagcacaaaataggtgaacaaatcgggaggaaggtggtaacacaggaatgggaacgtaaaagtcaaagtaggcaggactcaaactggccataaaggcactacggcatgttcataaacaccatcaagtaaaagaaaggggaatcaagatgttctcacttcttttctgctccaccttaatactccatctagccactggtatggagcatgtcatcaactcattcttctcacaagctagcaagggaattaaacattttatcagtcaaccctatgctcaccaagtgagccaatgttacacagtgattttgtgcatccagtgactgagaactacaggcaaggataggccctgactgttaataaattggtcgtggctattactagaaaattatgggtgcaggcatttacctatacaatgacctgcttactgtggcagctaacaatatagtcaaaccagtctattaccatatgatgtcctattaacaagagagcccagttgaaggatgtttcatacttttagaaagcctaatttcttactgnaatatcctccatccctcttttaaaaaggctgnagttcaaaaagcttttatgntctttcctgaaacaaagagaactttggtcaaaagccaatttttaagaagcatcacttctgctgagtaggcaaaacaatggactntnaccaccagacatnattttctttccttaaaatctganggttatgctggnaaaataacccatttttttttaaacatctaattaataaaggntcaangaaatnagatatggagga

SEQ ID NO: 342 - DNA, 914 bp, Homo sapiens
  misc_feature (3)..(4): n is a, c, g, or t
  misc_feature (15)..(15): n is a, c, g, or t
  misc_feature (685)..(685): n is a, c, g, or t
  misc_feature (789)..(789): n is a, c, g, or t
  misc_feature (802)..(802): n is a, c, g, or t
  misc_feature (820)..(820): n is a, c, g, or t
  misc_feature (867)..(867): n is a, c, g, or t
  misc_feature (870)..(870): n is a, c, g, or t
  misc_feature (884)..(884): n is a, c, g, or t
  misc_feature (886)..(886): n is a, c, g, or t
  misc_feature (889)..(889): n is a, c, g, or t
  misc_feature (898)..(898): n is a, c, g, or t
  misc_feature (910)..(910): n is a, c, g, or t
  misc_feature (914)..(914): n is a, c, g, or t
  nbla-12048-f
ggnnagttgttcctntgcctgttggcctactgggttactagcttgtgtgaagacattcttttctccttccattcttgtttacagttagctgagcagatgacacagtcagatgcacaggataatgctgactacagattatttcagaaaacactcaaattgtgtcgtttttttgccaactcccttttgcactacgctaaggaatttcttcctttcctctctgattcttgctgtactttgcaccaactgtatcttcagatacacagcaagtttcctccaagcctttatgctaccaggatttctaaagcacaccaagaggaaatagcaggtgctttcctagtgacactggatccacttatcagtcagctgctcacatttcagcctttcatgcaggtggttttggacagtaaattagacctgccatgtgaactgcagtttccacaatgtcttcttctggttgttgtcatggataagctgccatctcagcctaaggaagtgcaaaccctgtggtgcacagacagccaggtctcagaaacgacaaccaggatatctctactcaaagccgttttctacagttctgagcagtgttctggtgaactctctctacctgttcatttacagggattaaagagtaaggggaaagctgaggtggctgcaccttgtatcaagcatgtttgtgttcatctgnggtacatttattacttcctttcatccctcactggttggtgaactggatgctgctctgctgaatgctgtacttaagtgctaatatgaacacctctttgttagctntgggatgcatggngcttccttgctcgatatngggactgcttgaactggggtgcaccaccatgttaaccataagtgggntcnatcttgataaaagncnatncccctgggngaaatgtttttnaacn

SEQ ID NO: 343 - DNA, 995 bp, Homo sapiens
  misc_feature (3)..(4): n is a, c, g, or t
  misc_feature (18)..(19): n is a, c, g, or t
  misc_feature (47)..(47): n is a, c, g, or t
  misc_feature (66)..(66): n is a, c, g, or t
  misc_feature (82)..(82): n is a, c, g, or t
  misc_feature (87)..(87): n is a, c, g, or t
  misc_feature (90)..(90): n is a, c, g, or t
  misc_feature (102)..(102): n is a, c, g, or t
  misc_feature (111)..(111): n is a, c, g, or t
  misc_feature (120)..(120): n is a, c, g, or t
  misc_feature (133)..(133): n is a, c, g, or t
  misc_feature (150)..(150): n is a, c, g, or t
  misc_feature (203)..(203): n is a, c, g, or t
  misc_feature (205)..(205): n is a, c, g, or t
  misc_feature (217)..(217): n is a, c, g, or t
  misc_feature (241)..(241): n is a, c, g, or t
  misc_feature (253)..(253): n is a, c, g, or t
  misc_feature (266)..(266): n is a, c, g, or t
  misc_feature (272)..(272): n is a, c, g, or t
  misc_feature (287)..(287): n is a, c, g, or t
  misc_feature (289)..(289): n is a, c, g, or t
  misc_feature (314)..(314): n is a, c, g, or t
  misc_feature (317)..(317): n is a, c, g, or t
  misc_feature (343)..(343): n is a, c, g, or t
  misc_feature (351)..(351): n is a, c, g, or t
  misc_feature (364)..(364): n is a, c, g, or t
  misc_feature (377)..(377): n is a, c, g, or t
  misc_feature (383)..(383): n is a, c, g, or t
  misc_feature (411)..(411): n is a, c, g, or t
  misc_feature (432)..(432): n is a, c, g, or t
  misc_feature (443)..(443): n is a, c, g, or t
  misc_feature (452)..(452): n is a, c, g, or t
  misc_feature (461)..(461): n is a, c, g, or t
  misc_feature (477)..(477): n is a, c, g, or t
  misc_feature (485)..(485): n is a, c, g, or t
  misc_feature (488)..(488): n is a, c, g, or t
  misc_feature (504)..(504): n is a, c, g, or t
  misc_feature (512)..(512): n is a, c, g, or t
  misc_feature (517)..(517): n is a, c, g, or t
  misc_feature (524)..(524): n is a, c, g, or t
  misc_feature (542)..(542): n is a, c, g, or t
  misc_feature (552)..(552): n is a, c, g, or t
  misc_feature (588)..(588): n is a, c, g, or t
  misc_feature (617)..(617): n is a, c, g, or t
  misc_feature (659)..(659): n is a, c, g, or t
  misc_feature (673)..(673): n is a, c, g, or t
  misc_feature (698)..(698): n is a, c, g, or t
  misc_feature (702)..(702): n is a, c, g, or t
  misc_feature (726)..(726): n is a, c, g, or t
  misc_feature (740)..(741): n is a, c, g, or t
  misc_feature (762)..(762): n is a, c, g, or t
  misc_feature (771)..(771): n is a, c, g, or t
  misc_feature (781)..(781): n is a, c, g, or t
  misc_feature (801)..(801): n is a, c, g, or t
  misc_feature (815)..(815): n is a, c, g, or t
  misc_feature (824)..(824): n is a, c, g, or t
  misc_feature (828)..(828): n is a, c, g, or t
  misc_feature (833)..(833): n is a, c, g, or t
  misc_feature (844)..(844): n is a, c, g, or t
  misc_feature (853)..(853): n is a, c, g, or t
  misc_feature (882)..(882): n is a, c, g, or t
  misc_feature (906)..(906): n is a, c, g, or t
  misc_feature (913)..(913): n is a, c, g, or t
  misc_feature (921)..(921): n is a, c, g, or t
  misc_feature (933)..(933): n is a, c, g, or t
  misc_feature (959)..(959): n is a, c, g, or t
  misc_feature (986)..(986): n is a, c, g, or t
  misc_feature (993)..(993): n is a, c, g, or t
  nbla-12048-r1
ggnnagttgggccttggnntttccttttttttttttttttttttttnttcaaactttacaaaattngttttatatctgttanaaaangtncagacataagtnttttcagtngacaaagcntcaaacccagttntgccagttctgcctagngataagtttcaccctagagtatgtatgtaacgttttagcttatccatcctttntnggagcgcctccntttccattgaaagccaggctggancaggaccctttnggagtagggactnagttgnttccaaagcccctgntnttgtatgcagcgctgacctgtactnttnttcccaggggaactcctgacgagctntttttgcntaaggctgtaaanatgacctttttgntttttntacagtcacattagcaaagggttcccanaaaatacctttttcctgtttnacacgttccantttggcagnttcagtttnatttacaaacccagtnttttccanaanggatacaactttgttnttagtttnttcanaactganacactggggaactatctnttcatgattngttccctcagcgaactgagtaaacgcctccaaggtntgttgttttagcagccaactcctgtcagntagcagtaaggcaaacatacagggacaggttgggcagaattnttggcctgggatangcttcaggtataaaaagtttttccntaanggaaggatccccaaattccccaanatttggccaaaccnnaacattaggttcaggggaagngctttttanttttaaaagntaaggccggggggggtcttngacaaaaaggtttnaaccttgcncctnggaanggtttttccantttttttanggggatcttttaaagaagtttttgggaantgggaaaaaaaaattcccccaaancaggggngggggaanggtaaaaaaaangggcctgggaaaatgggtcttgggtngggaaaaaaatataaagggggggtggngatcccncg

SEQ ID NO: 344 - DNA, 961 bp, Homo sapiens
  misc_feature (1)..(2): n is a, c, g, or t
  misc_feature (805)..(805): n is a, c, g, or t
  misc_feature (807)..(807): n is a, c, g, or t
  misc_feature (819)..(819): n is a, c, g, or t
  misc_feature (827)..(827): n is a, c, g, or t
  misc_feature (858)..(858): n is a, c, g, or t
  misc_feature (864)..(864): n is a, c, g, or t
  misc_feature (879)..(879): n is a, c, g, or t
  misc_feature (889)..(889): n is a, c, g, or t
  misc_feature (894)..(894): n is a, c, g, or t
  misc_feature (905)..(905): n is a, c, g, or t
  misc_feature (950)..(950): n is a, c, g, or t
  misc_feature (959)..(959): n is a, c, g, or t
  nbla-12055-f
nngttgttcctctgcactgttggcctactggctgaaatattaataggtggcctataaggatctttcatgttttttgaatttcttaattaagtatcattttgtgttaagcttagaagactgagagctgaggagagtggacaaataaatgttggaattaggaaagttacatgaaggaaagtgggtctgagctgggttttgaaagtaggcagaatttagatcagtagagcaaagaggataggatagtctaaatgtggagaatgctgtatgaatggaggcagaatatgtattgaacatgaggaaccatcaagaggccggctcagtgagggaagaagggggcttctggaggcaccataggtagacataagacattaacagattattgaccaacaggcaggggaggttaatatgctccaatgaataaagagccatcatatattttataatggagactaacaggttgatgttgctgagaaaataatatggactttgcattcaatgatgtatcttttcacaaccatatctttgataaacacaatttgggttatactggcagggattaagtagtggaaaatctcttagaagaaatgtgcttctactgtcccccttaccaaaatagaacagatgagccctaatcagagctggtaactgtaatggtgattgctctgaggacccaatgtatataaacatcactatttgaatacctagatttgggccaagtaataagggagggaaagtttttgacccctgagattaccccccagaattaaaagtaggggaccctttttggagatggggcttaaaacangntttttcaaggtncagttagncaccccttggctttttcaagaaaggaaggcnggaccnggaaaattccccctncctttggaantccanaatttggtatngttttcccgggaattttttaaccccgaccttaagatctcagggcnggggttcanca

SEQ ID NO: 345 - DNA, 902 bp, Homo sapiens
  misc_feature (703)..(703): n is a, c, g, or t
  misc_feature (764)..(764): n is a, c, g, or t
  misc_feature (780)..(780): n is a, c, g, or t
  misc_feature (785)..(785): n is a, c, g, or t
  misc_feature (798)..(798): n is a, c, g, or t
  misc_feature (804)..(804): n is a, c, g, or t
  misc_feature (836)..(836): n is a, c, g, or t
  misc_feature (843)..(843): n is a, c, g, or t
  misc_feature (849)..(849): n is a, c, g, or t
  misc_feature (888)..(888): n is a, c, g, or t
  misc_feature (899)..(899): n is a, c, g, or t
  misc_feature (902)..(902): n is a, c, g, or t
  nbla-12055-r1
gattgggccttttttttttttttttactaattcagttcatttaactttgcctccagcagctcaccataaaatttgggtccaaaaaggccaaggaatgtattatcagaaatgttagctatctctaggaaaatctgtcattcatttaagtgataatctttaaaattagcataactatattctggatcattttattacgagactatcatgtgatttcaatgtctgagtttattaccattgtacgagcaacatgctaagttacaactgtaactcccagggttggtttagcaggaaagtgatggaggcagacttaacagtgatgcgtgtagttcagcaaaggccaaatgacagcactgggagccataatggtggtttcctagtaattcaaacagaggaaagtagcaagaatacactgatctcagaataccaggcttgtcagactaaaaaatcctgtgctttaacagtcagtggttgacagcaacttatcctaagcaaaaaaaaaaaaatcatctaaaacagatgtcatggtaatttcaattttatagctttctgaagtgttgattctatttaatttgcatgtttgttttgttttcatggctgtataaagacctattacacaagagttcaaagcctgttttttaacatatactttaatctcatgcaatattataaagccaaaaaattaaatatgattttagaggtattntattcaagatgatttttccccttttaggaagggcccttttcatttctcaaaatttaacctngcagtttacccattgnctttnttttggttattcnaggccncctattaaccttttcaaaattattgggtttanctttggnaaaaanggctttttaaatcttttcctgcccaggctaaaaattctngagaacaagcngcn

SEQ ID NO: 346 - DNA, 1532 bp, Homo sapiens
  misc_feature (8)..(9): n is a, c, g, or t
  misc_feature (13)..(13): n is a, c, g, or t
  misc_feature (16)..(17): n is a, c, g, or t
  misc_feature (24)..(24): n is a, c, g, or t
  misc_feature (38)..(38): n is a, c, g, or t
  misc_feature (75)..(75): n is a, c, g, or t
  misc_feature (85)..(85): n is a, c, g, or t
  misc_feature (94)..(94): n is a, c, g, or t
  misc_feature (110)..(110): n is a, c, g, or t
  misc_feature (112)..(112): n is a, c, g, or t
  misc_feature (130)..(130): n is a, c, g, or t
  misc_feature (136)..(136): n is a, c, g, or t
  misc_feature (140)..(140): n is a, c, g, or t
  misc_feature (147)..(147): n is a, c, g, or t
  misc_feature (150)..(150): n is a, c, g, or t
  misc_feature (152)..(152): n is a, c, g, or t
  misc_feature (164)..(164): n is a, c, g, or t
  misc_feature (170)..(170): n is a, c, g, or t
  misc_feature (185)..(185): n is a, c, g, or t
  misc_feature (202)..(202): n is a, c, g, or t
  misc_feature (212)..(212): n is a, c, g, or t
  misc_feature (223)..(224): n is a, c, g, or t
  misc_feature (237)..(238): n is a, c, g, or t
  misc_feature (240)..(240): n is a, c, g, or t
  misc_feature (246)..(246): n is a, c, g, or t
  misc_feature (254)..(254): n is a, c, g, or t
  misc_feature (256)..(257): n is a, c, g, or t
  misc_feature (281)..(281): n is a, c, g, or t
  misc_feature (289)..(289): n is a, c, g, or t
  misc_feature (292)..(292): n is a, c, g, or t
  misc_feature (294)..(295): n is a, c, g, or t
  misc_feature (301)..(301): n is a, c, g, or t
  misc_feature (308)..(308): n is a, c, g, or t
  misc_feature (316)..(316): n is a, c, g, or t
  misc_feature (325)..(325): n is a, c, g, or t
  misc_feature (329)..(329): n is a, c, g, or t
  misc_feature (350)..(350): n is a, c, g, or t
  misc_feature (352)..(353): n is a, c, g, or t
  misc_feature (359)..(359): n is a, c, g, or t
  misc_feature (362)..(362): n is a, c, g, or t
  misc_feature (377)..(378): n is a, c, g, or t
  misc_feature (385)..(385): n is a, c, g, or t
  misc_feature (387)..(387): n is a, c, g, or t
  misc_feature (409)..(410): n is a, c, g, or t
  misc_feature (419)..(419): n is a, c, g, or t
  misc_feature (427)..(427): n is a, c, g, or t
  misc_feature (431)..(431): n is a, c, g, or t
  misc_feature (434)..(434): n is a, c, g, or t
  misc_feature (441)..(441): n is a, c, g, or t
  misc_feature (446)..(446): n is a, c, g, or t
  misc_feature (457)..(457): n is a, c, g, or t
  misc_feature (459)..(459): n is a, c, g, or t
  misc_feature (467)..(468): n is a, c, g, or t
  misc_feature (474)..(475): n is a, c, g, or t
  misc_feature (477)..(477): n is a, c, g, or t
  misc_feature (479)..(479): n is a, c, g, or t
  misc_feature (484)..(484): n is a, c, g, or t
  misc_feature (490)..(490): n is a, c, g, or t
  misc_feature (496)..(496): n is a, c, g, or t
  misc_feature (507)..(508): n is a, c, g, or t
  misc_feature (512)..(514): n is a, c, g, or t
  misc_feature (518)..(518): n is a, c, g, or t
  misc_feature (524)..(526): n is a, c, g, or t
  misc_feature (529)..(531): n is a, c, g, or t
  misc_feature (538)..(539): n is a, c, g, or t
  misc_feature (542)..(542): n is a, c, g, or t
  misc_feature (546)..(547): n is a, c, g, or t
  misc_feature (561)..(561): n is a, c, g, or t
  misc_feature (565)..(565): n is a, c, g, or t
  misc_feature (567)..(567): n is a, c, g, or t
  misc_feature (574)..(574): n is a, c, g, or t
  misc_feature (577)..(578): n is a, c, g, or t
  misc_feature (580)..(580): n is a, c, g, or t
  misc_feature (582)..(584): n is a, c, g, or t
  misc_feature (587)..(589): n is a, c, g, or t
  misc_feature (597)..(597): n is a, c, g, or t
  misc_feature (605)..(605): n is a, c, g, or t
  misc_feature (612)..(612): n is a, c, g, or t
  misc_feature (622)..(622): n is a, c, g, or t
  misc_feature (625)..(625): n is a, c, g, or t
  misc_feature (627)..(628): n is a, c, g, or t
  misc_feature (631)..(631): n is a, c, g, or t
  misc_feature (635)..(635): n is a, c, g, or t
  misc_feature (643)..(643): n is a, c, g, or t
  misc_feature (648)..(648): n is a, c, g, or t
  misc_feature (650)..(651): n is a, c, g, or t
  misc_feature (657)..(657): n is a, c, g, or t
  misc_feature (660)..(660): n is a, c, g, or t
  misc_feature (663)..(663): n is a, c, g, or t
  misc_feature (665)..(666): n is a, c, g, or t
  misc_feature (670)..(670): n is a, c, g, or t
  misc_feature (673)..(673): n is a, c, g, or t
  misc_feature (676)..(678): n is a, c, g, or t
  misc_feature (682)..(682): n is a, c, g, or t
  misc_feature (685)..(685): n is a, c, g, or t
  misc_feature (692)..(692): n is a, c, g, or t
  misc_feature (696)..(697): n is a, c, g, or t
  misc_feature (700)..(700): n is a, c, g, or t
  misc_feature (702)..(702): n is a, c, g, or t
  misc_feature (706)..(706): n is a, c, g, or t
  misc_feature (708)..(708): n is a, c, g, or t
  misc_feature (710)..(710): n is a, c, g, or t
  misc_feature (713)..(713): n is a, c, g, or t
  misc_feature (728)..(728): n is a, c, g, or t
  misc_feature (734)..(734): n is a, c, g, or t
  misc_feature (741)..(741): n is a, c, g, or t
  misc_feature (752)..(753): n is a, c, g, or t
  misc_feature (757)..(757): n is a, c, g, or t
  misc_feature (767)..(767): n is a, c, g, or t
  misc_feature (784)..(784): n is a, c, g, or t
  misc_feature (792)..(792): n is a, c, g, or t
  misc_feature (796)..(796): n is a, c, g, or t
  misc_feature (801)..(801): n is a, c, g, or t
  misc_feature (806)..(806): n is a, c, g, or t
  misc_feature (810)..(810): n is a, c, g, or t
  misc_feature (812)..(812): n is a, c, g, or t
  misc_feature (815)..(815): n is a, c, g, or t
  misc_feature (818)..(818): n is a, c, g, or t
  misc_feature (826)..(826): n is a, c, g, or t
  misc_feature (829)..(829): n is a, c, g, or t
  misc_feature (836)..(836): n is a, c, g, or t
  misc_feature (839)..(839): n is a, c, g, or t
  misc_feature (841)..(841): n is a, c, g, or t
  misc_feature (843)..(843): n is a, c, g, or t
  misc_feature (849)..(850): n is a, c, g, or t
  misc_feature (855)..(855): n is a, c, g, or t
  misc_feature (857)..(857): n is a, c, g, or t
  misc_feature (860)..(860): n is a, c, g, or t
  misc_feature (870)..(870): n is a, c, g, or t
  misc_feature (874)..(876): n is a, c, g, or t
  misc_feature (882)..(882): n is a, c, g, or t
  misc_feature (888)..(888): n is a, c, g, or t
  misc_feature (899)..(899): n is a, c, g, or t
  misc_feature (910)..(910): n is a, c, g, or t
  misc_feature (913)..(913): n is a, c, g, or t
  misc_feature (916)..(918): n is a, c, g, or t
  misc_feature (924)..(924): n is a, c, g, or t
  misc_feature (926)..(926): n is a, c, g, or t
  misc_feature (929)..(930): n is a, c, g, or t
  misc_feature (939)..(939): n is a, c, g, or t
  misc_feature (947)..(947): n is a, c, g, or t
  misc_feature (950)..(950): n is a, c, g, or t
  misc_feature (952)..(952): n is a, c, g, or t
  misc_feature (965)..(965): n is a, c, g, or t
  misc_feature (971)..(972): n is a, c, g, or t
  misc_feature (987)..(987): n is a, c, g, or t
  misc_feature (989)..(989): n is a, c, g, or t
  misc_feature (994)..(994): n is a, c, g, or t
  misc_feature (997)..(999): n is a, c, g, or t
  misc_feature (1003)..(1003): n is a, c, g, or t
  misc_feature (1013)..(1013): n is a, c, g, or t
  misc_feature (1017)..(1018): n is a, c, g, or t
  misc_feature (1020)..(1020): n is a, c, g, or t
  misc_feature (1029)..(1029): n is a, c, g, or t
  misc_feature (1031)..(1031): n is a, c, g, or t
  misc_feature (1038)..(1038): n is a, c, g, or t
  misc_feature (1047)..(1047): n is a, c, g, or t
  misc_feature (1053)..(1053): n is a, c, g, or t
  misc_feature (1064)..(1064): n is a, c, g, or t
  misc_feature (1067)..(1067): n is a, c, g, or t
  misc_feature (1077)..(1077): n is a, c, g, or t
  misc_feature (1079)..(1079): n is a, c, g, or t
  misc_feature (1081)..(1081): n is a, c, g, or t
  misc_feature (1083)..(1084): n is a, c, g, or t
  misc_feature (1094)..(1095): n is a, c, g, or t
  misc_feature (1101)..(1101): n is a, c, g, or t
  misc_feature (1111)..(1111): n is a, c, g, or t
  misc_feature (1113)..(1113): n is a, c, g, or t
  misc_feature (1118)..(1118): n is a, c, g, or t
  misc_feature (1129)..(1129): n is a, c, g, or t
  misc_feature (1131)..(1131): n is a, c, g, or t
  misc_feature (1136)..(1136): n is a, c, g, or t
  misc_feature (1138)..(1139): n is a, c, g, or t
  misc_feature (1144)..(1144): n is a, c, g, or t
  misc_feature (1148)..(1148): n is a, c, g, or t
  misc_feature (1151)..(1151): n is a, c, g, or t
  misc_feature (1153)..(1153): n is a, c, g, or t
  misc_feature (1159)..(1159): n is a, c, g, or t
  misc_feature (1161)..(1161): n is a, c, g, or t
  misc_feature (1168)..(1168): n is a, c, g, or t
  misc_feature (1170)..(1170): n is a, c, g, or t
  misc_feature (1173)..(1173): n is a, c, g, or t
  misc_feature (1185)..(1185): n is a, c, g, or t
  misc_feature (1194)..(1194): n is a, c, g, or t
  misc_feature (1200)..(1200): n is a, c, g, or t
  misc_feature (1202)..(1203): n is a, c, g, or t
  misc_feature (1207)..(1207): n is a, c, g, or t
  misc_feature (1209)..(1211): n is a, c, g, or t
  misc_feature (1214)..(1214): n is a, c, g, or t
  misc_feature (1216)..(1216): n is a, c, g, or t
  misc_feature (1218)..(1218): n is a, c, g, or t
  misc_feature (1220)..(1222): n is a, c, g, or t
  misc_feature (1228)..(1228): n is a, c, g, or t
  misc_feature (1230)..(1230): n is a, c, g, or t
  misc_feature (1233)..(1233): n is a, c, g, or t
  misc_feature (1240)..(1240): n is a, c, g, or t
  misc_feature (1261)..(1263): n is a, c, g, or t
  misc_feature (1266)..(1266): n is a, c, g, or t
  misc_feature (1279)..(1280): n is a, c, g, or t
  misc_feature (1285)..(1285): n is a, c, g, or t
  misc_feature (1287)..(1287): n is a, c, g, or t
  misc_feature (1291)..(1291): n is a, c, g, or t
  misc_feature (1293)..(1296): n is a, c, g, or t
  misc_feature (1300)..(1300): n is a, c, g, or t
  misc_feature (1307)..(1308): n is a, c, g, or t
  misc_feature (1311)..(1311): n is a, c, g, or t
  misc_feature (1313)..(1313): n is a, c, g, or t
  misc_feature (1316)..(1316): n is a, c, g, or t
  misc_feature (1325)..(1325): n is a, c, g, or t
  misc_feature (1329)..(1329): n is a, c, g, or t
  misc_feature (1342)..(1342): n is a, c, g, or t
  misc_feature (1350)..(1350): n is a, c, g, or t
  misc_feature (1352)..(1352): n is a, c, g, or t
  misc_feature (1359)..(1359): n is a, c, g, or t
  misc_feature (1361)..(1361): n is a, c, g, or t
  misc_feature (1364)..(1364): n is a, c, g, or t
  misc_feature (1370)..(1371): n is a, c, g, or t
  misc_feature (1374)..(1375): n is a, c, g, or t
  misc_feature (1377)..(1377): n is a, c, g, or t
  misc_feature (1380)..(1380): n is a, c, g, or t
  misc_feature (1384)..(1384): n is a, c, g, or t
  misc_feature (1387)..(1387): n is a, c, g, or t
  misc_feature (1389)..(1389): n is a, c, g, or t
  misc_feature (1392)..(1392): n is a, c, g, or t
  misc_feature (1394)..(1394): n is a, c, g, or t
  misc_feature (1396)..(1397): n is a, c, g, or t
  misc_feature (1403)..(1403): n is a, c, g, or t
  misc_feature (1406)..(1406): n is a, c, g, or t
  misc_feature (1415)..(1415): n is a, c, g, or t
  misc_feature (1417)..(1417): n is a, c, g, or t
  misc_feature (1419)..(1419): n is a, c, g, or t
  misc_feature (1423)..(1423): n is a, c, g, or t
  misc_feature (1427)..(1427): n is a, c, g, or t
  misc_feature (1430)..(1430): n is a, c, g, or t
  misc_feature (1434)..(1434): n is a, c, g, or t
  misc_feature (1444)..(1444): n is a, c, g, or t
  misc_feature (1448)..(1448): n is a, c, g, or t
  misc_feature (1456)..(1457): n is a, c, g, or t
  misc_feature (1464)..(1464): n is a, c, g, or t
  misc_feature (1467)..(1468): n is a, c, g, or t
  misc_feature (1470)..(1471): n is a, c, g, or t
  misc_feature (1476)..(1476): n is a, c, g, or t
  misc_feature (1480)..(1480): n is a, c, g, or t
  misc_feature (1492)..(1492): n is a, c, g, or t
  misc_feature (1496)..(1496): n is a, c, g, or t
  misc_feature (1501)..(1501): n is a, c, g, or t
  misc_feature (1510)..(1510): n is a, c, g, or t
  misc_feature (1512)..(1513): n is a, c, g, or t
  misc_feature (1519)..(1519): n is a, c, g, or t
  misc_feature (1522)..(1523): n is a, c, g, or t
  misc_feature (1528)..(1528): n is a, c, g, or t
  nbla-12074-f
ggcccganntacnctnnggaaagnccccccaccgtttngggaaaaaggacccgccgggggtggctgcgtgccctngtggcggatntccagcctnttgtatgtcggcccangngcgctgaaggctgagggngctttntgcntaggaancgncncctgcggtggangaggcngcggttgccccatgnagtgttactacatttgnaattagcttnacgcattttannatcgagacacttnngnaacatnaagggagnanntccggggaccttttagcaagaacngggagcanaantnnggactntgctganaaaggaanataccaatngaanaagcttctggaagatctgaangnnaatttntantgttgaacttcatgnnacaatgnantactataagcaccacgagttcnncaattacanttaatttnatangancatgctnacagncatgaggcttnantggaaatnnaaacannangngaatntgctcnaaaatntagcatctacnntttnnncgcngacgtnnngannnagaaaannagngtannaagggctacctttnaaananacccggncannanannntgnnnattggaancttataantaaaaangggaaacaanatngnngantggnagggcacnacctntnnggtaanggnagngnnacanccncannngatnttnacgaaantctnnaancnatancncngtngtatatccttggtcntgatancaaagcnataaaaaaacnnctgnggtatatatntgtggaaaaaaaatatnttgtctcncatnaaaantagangatntntcnagnctccttgntangcgaaanctntntntgtatnnatgtntntanatagtatccncccnnnaatctntacacngcaaaatttcntttacaacaanaangannnatggancntcnnttcattttnatatgttnttnanaaaagtattgatntacgtnncaaaaaagcttaaangnaaatnctnnnctcntctattgacncgcnncnatctggtanantgtaaanggctcaagnacactntacagatttanagnctttttcagnantnanngtaaaaaaannctctcnggtaataaanantaaangtggttttccntncagcnanntattnagtnttntngtttantnccccacnangtnccacactatatntttaatttnttaacncnncatnannntgntntntnnntggggntngtnttataanaaaaaatccttctcccgagannnggncgatatatttatnncaccncngtanannnncccncgggtanntananttnccagtgtgntcgnagacagcgtcgcntataaagngnaaaaaantnttnccttcnnaannanagnatanagngnccncnanntcatanaancgtgaaatncncntaantganaanatcnttatgtatanaacntacgcgtnnactctcnttnntnntctcntgtntcttatctaatnggcnaaagnattcgaatncnntctccncannacaanagcg

SEQ ID NO: 347 - DNA, 1007 bp, Homo sapiens
  misc_feature (22)..(22): n is a, c, g, or t
  misc_feature (37)..(37): n is a, c, g, or t
  misc_feature (89)..(89): n is a, c, g, or t
  misc_feature (120)..(120): n is a, c, g, or t
  misc_feature (125)..(125): n is a, c, g, or t
  misc_feature (143)..(143): n is a, c, g, or t
  misc_feature (426)..(426): n is a, c, g, or t
  misc_feature (471)..(471): n is a, c, g, or t
  misc_feature (520)..(520): n is a, c, g, or t
  misc_feature (545)..(545): n is a, c, g, or t
  misc_feature (554)..(554): n is a, c, g, or t
  misc_feature (563)..(563): n is a, c, g, or t
  misc_feature (574)..(574): n is a, c, g, or t
  misc_feature (585)..(585): n is a, c, g, or t
  misc_feature (589)..(590): n is a, c, g, or t
  misc_feature (596)..(596): n is a, c, g, or t
  misc_feature (664)..(664): n is a, c, g, or t
  misc_feature (668)..(668): n is a, c, g, or t
  misc_feature (673)..(674): n is a, c, g, or t
  misc_feature (678)..(678): n is a, c, g, or t
  misc_feature (705)..(705): n is a, c, g, or t
  misc_feature (707)..(707): n is a, c, g, or t
  misc_feature (711)..(711): n is a, c, g, or t
  misc_feature (713)..(714): n is a, c, g, or t
  misc_feature (720)..(720): n is a, c, g, or t
  misc_feature (723)..(723): n is a, c, g, or t
  misc_feature (726)..(727): n is a, c, g, or t
  misc_feature (732)..(732): n is a, c, g, or t
  misc_feature (737)..(737): n is a, c, g, or t
  misc_feature (739)..(739): n is a, c, g, or t
  misc_feature (746)..(746): n is a, c, g, or t
  misc_feature (749)..(749): n is a, c, g, or t
  misc_feature (754)..(754): n is a, c, g, or t
  misc_feature (763)..(763): n is a, c, g, or t
  misc_feature (776)..(776): n is a, c, g, or t
  misc_feature (784)..(785): n is a, c, g, or t
  misc_feature (804)..(804): n is a, c, g, or t
  misc_feature (806)..(806): n is a, c, g, or t
  misc_feature (813)..(814): n is a, c, g, or t
  misc_feature (821)..(822): n is a, c, g, or t
  misc_feature (835)..(835): n is a, c, g, or t
  misc_feature (838)..(838): n is a, c, g, or t
  misc_feature (841)..(842): n is a, c, g, or t
  misc_feature (857)..(857): n is a, c, g, or t
  misc_feature (860)..(860): n is a, c, g, or t
  misc_feature (864)..(864): n is a, c, g, or t
  misc_feature (872)..(872): n is a, c, g, or t
  misc_feature (880)..(880): n is a, c, g, or t
  misc_feature (885)..(887): n is a, c, g, or t
  misc_feature (892)..(892): n is a, c, g, or t
  misc_feature (897)..(898): n is a, c, g, or t
  misc_feature (906)..(907): n is a, c, g, or t
  misc_feature (910)..(910): n is a, c, g, or t
  misc_feature (918)..(918): n is a, c, g, or t
  misc_feature (927)..(928): n is a, c, g, or t
  misc_feature (940)..(940): n is a, c, g, or t
  misc_feature (942)..(942): n is a, c, g, or t
  misc_feature (947)..(947): n is a, c, g, or t
  misc_feature (949)..(950): n is a, c, g, or t
  misc_feature (955)..(955): n is a, c, g, or t
  misc_feature (963)..(963): n is a, c, g, or t
  misc_feature (968)..(968): n is a, c, g, or t
  misc_feature (970)..(971): n is a, c, g, or t
  misc_feature (973)..(973): n is a, c, g, or t
  misc_feature (979)..(979): n is a, c, g, or t
  misc_feature (990)..(990): n is a, c, g, or t
  misc_feature (1000)..(1001): n is a, c, g, or t
  misc_feature (1005)..(1005): n is a, c, g, or t
  nbla-12074-r1
gttggggcctttgtttttttcntttttcttttacttnaatggaaccagtattcatgggtctctttcaaccttattttgttgtatttttnatctagagtgtcctgttttatttgacttggnagtanaattatacttttctgctnctctgatcttacaggaaatgtttttatacctctgacctgtgttctcattttttccagaatcacaactactggagagaatatcatcagccaaaagaggagtgacttggctgcatttatttttgctacttccaatttcacaatcagtgagtccttctgtagatacatccttgtaatctgaaagtggtcccatgcaaatgtcttcctgcttctgctgagaacaaagatcttttaagtctggcttatttttatctagattattatttactttagtagacttgaagtnaaaacatagaggattacagctataggaaattgatggtttcgtagntgtataaaccagcatttctgatggccactgaagaactgtagatctgtgnttgttaaggacaggtacaaatggcntcacattgncttttgcangaaatttgctnttcttatgtantagnnatgttnaccctcttcagtatttttgaagggggcccaattgtctcggggaccatttttttattttcaacctcaanttgnggganncccncggtttgctttaacatttttccttctntngggnannctctgnccncannatttngccantnaattttnacnttgtncaagaaacntggcgggattttntttttccnntaaccaaaccttcaaaaancnatgtttnntccccannttaaacaaggggngcnagnntcctttccaattttnatnttanccaacccncccttttnttctnnnggagnggggnnaatttttnngtncccagcgncctataacnngggggggacccncngaaanannttttntgtgaccncaaantnntntttctngtcgctttttncagagaaaanntaanca

SEQ ID NO: 348 - DNA, 963 bp, Homo sapiens
  misc_feature (3)..(3): n is a, c, g, or t
  misc_feature (6)..(8): n is a, c, g, or t
  misc_feature (18)..(18): n is a, c, g, or t
  misc_feature (47)..(47): n is a, c, g, or t
  misc_feature (122)..(122): n is a, c, g, or t
  misc_feature (714)..(714): n is a, c, g, or t
  misc_feature (732)..(733): n is a, c, g, or t
  misc_feature (762)..(762): n is a, c, g, or t
  misc_feature (782)..(782): n is a, c, g, or t
  misc_feature (797)..(797): n is a, c, g, or t
  misc_feature (814)..(814): n is a, c, g, or t
  misc_feature (819)..(819): n is a, c, g, or t
  misc_feature (824)..(824): n is a, c, g, or t
  misc_feature (844)..(845): n is a, c, g, or t
  misc_feature (848)..(848): n is a, c, g, or t
  misc_feature (866)..(866): n is a, c, g, or t
  misc_feature (871)..(871): n is a, c, g, or t
  misc_feature (888)..(888): n is a, c, g, or t
  misc_feature (893)..(893): n is a, c, g, or t
  misc_feature (900)..(900): n is a, c, g, or t
  misc_feature (902)..(902): n is a, c, g, or t
  misc_feature (918)..(918): n is a, c, g, or t
  misc_feature (922)..(923): n is a, c, g, or t
  misc_feature (926)..(926): n is a, c, g, or t
  misc_feature (935)..(935): n is a, c, g, or t
  misc_feature (943)..(943): n is a, c, g, or t
  misc_feature (959)..(959): n is a, c, g, or t
  nbla-12075-f
ggnagnnnttccttggantgttcccctactggttcgacttatctatnagcatcttcaacaatattcctacagttgtatgggtggcatgttggccatttgtgatgtagccgaatataggaagngtgccaaagacttcaagattccaatggtattacatctttttgatactctgcatgctctttgcaatcttctggtagttgccccagataatttaaagcaagtctgctcaggagaacaacttgctaatctggacaagaatatacttcactccttcgtacaacttcgtgctgattatagatctgcccgccttgctcgacacttcagctgagattgaatttacaaaggaattcagtgtcagttcctttacagaggaatgtcttatacttcagcagccctcggttgatagaaagcacaggagataccttatgacacagccaacattttgtgaaacaatgactggaacaaaacagcagccatacttacctttgaggttttatttaaagtttggataccactagctatattttgcttttttcccctcacattgaattttaattccattcttgaatgtagaaatttcagattctctaaaactacatgtcactgtttttatcctagaaaatgttgctgtcagaaggcaaaggaaatgttaccagtgttttccggttcttgtactttttaacatattccatttagaaatttttgccattctgntttccattaataataggnngaaatacagggaaaaactacattttggtnattccctcaagttttttaantgaccctttttcagncatcaaatttggttaantcaangaatnattttttaagggtttttccnnaanaataaatttttttttggncttcnttttccaaaaagggttnaaacnaatttanancattacttttccttgnccannttngggtttganttgggaantttttttttttttggngggg

SEQ ID NO: 349 - DNA, 977 bp, Homo sapiens
  misc_feature (21)..(21): n is a, c, g, or t
  misc_feature (31)..(31): n is a, c, g, or t
  misc_feature (43)..(43): n is a, c, g, or t
  misc_feature (87)..(87): n is a, c, g, or t
  misc_feature (116)..(116): n is a, c, g, or t
  misc_feature (124)..(124): n is a, c, g, or t
  misc_feature (714)..(714): n is a, c, g, or t
  misc_feature (739)..(739): n is a, c, g, or t
  misc_feature (761)..(761): n is a, c, g, or t
  misc_feature (774)..(774): n is a, c, g, or t
  misc_feature (794)..(794): n is a, c, g, or t
  misc_feature (806)..(806): n is a, c, g, or t
  misc_feature (813)..(814): n is a, c, g, or t
  misc_feature (840)..(841): n is a, c, g, or t
  misc_feature (845)..(845): n is a, c, g, or t
  misc_feature (854)..(854): n is a, c, g, or t
  misc_feature (856)..(856): n is a, c, g, or t
  misc_feature (861)..(861): n is a, c, g, or t
  misc_feature (863)..(863): n is a, c, g, or t
  misc_feature (878)..(878): n is a, c, g, or t
  misc_feature (884)..(884): n is a, c, g, or t
  misc_feature (886)..(886): n is a, c, g, or t
  misc_feature (892)..(892): n is a, c, g, or t
  misc_feature (909)..(909): n is a, c, g, or t
  misc_feature (911)..(911): n is a, c, g, or t
  misc_feature (941)..(941): n is a, c, g, or t
  misc_feature (955)..(955): n is a, c, g, or t
  misc_feature (966)..(966): n is a, c, g, or t
  misc_feature (971)..(971): n is a, c, g, or t
  nbla-12075-r1
gttggggcctttgttttttcntttttggatngcttaaaatgtnctctcatgttttatttgagattttttttcgttttttcttttttncaaattgacactgtacaaagagcttaaanggccagtnaaactactgccttaaaattgttggctttaagtaacagaggtaaaatttgaattcacatcagagctttctaaaatggcaatagtacaagcaaatgactttctctagtatccaaaacctgcgctggctctcccttggctagaaacaagacagccttctaaagctgccataatgtcctaaaatgctctgaaagaagttggtatacttcattccccagcttaccttggtaacactggactaaacagaaaatgaagaaaattcagtcaatagtaacttaaacagtactaagttagctctggacttagaaggtttggtaaagttgatgacattcagaataaggttctcagaagaaaagcagttttccaaaaataggctaaaaagcctatattaaagaaaaaatgccaagagtgaattgaatacttaagtttatctgttcctagaagactatgaacaccacaatgggagctgaaacactatatataatttagaatgcattctcccagagcaagtttataaggtttatagaatagtaatggcctttctaaattttcacttggatttttaaaaatttttattaaggtgattttatttantgtccattccaaaatttaaagcccnatttcccatttaaacttattanttcccaagggttngggaaattaaaccttttcangaaaaatggccntttttgnnaaaaaaaggggaaccaaattggaccnngganccctttttnangaacncntgggaaaaaaggccnaaaccnanggcccnttttggcaaaaagggcntncattctttcccaaaaatttttattcaaatnttccttcaaaattnctttcctttanaaaanaaaaaa

SEQ ID NO: 350 - DNA, 2698 bp, Homo sapiens
  nbla-12092
taggcctgtacggaagtgttacttctgctctaaaagctgcggaattcctcgagcactgttggcctactggggtgctttctgtttaacctggaaagtgtgattatattcgttaccttctttggtagacggaatagttgggaccacctttggtacataagaaattggtataacgatgctctgattagcacagtatatgcatacttctccaaagtgatatatgaagactcttttctttgcataaaaagcattaggcatataaatgtataaatatattttatcatgtacagtacaaaaatggaaccttatgcatgggccttaggaatacaggctagtatttcagcacagacttccctgcttgagttcttgctgatgcttgcaccgtgacagtgggcaccaacacagacgtgccacccaaccccctgcacacaccaccggccaccaggggcccccttgtgcgccttggctttataactcctctgggggtgatattggtggtaatcacagctcctagcataatgagagttccatttggtattgtcacacgtctcctgcctcgcttgggttgccatgtttgagcgatggccctgttgatttcaccctgccttttactgaatctgtaaattgttgtgcaattgtggttatagtagactgtagcacattgccttttctaaactgctacatgtttataatcttcatttttaaagtatgtgtaatttttttaagtatgtattctattcatatggtctgcttgtcagtgagccagacttgcttactatattcctttataataatgctagccacttcctggattctttagtaatgtgctgtatgcaagaactttccagtagcagtgaaggagggttgcctctccaagcttcctaagggatgctgccctgtgtggggatgcattgcagaggcactagtagcatgggggctagagtggggagcgagatgtaaaagggtggggggataggagaattccagagtgcttccagcattagggtcctgagaacttctgagttcagagaaacatgcaaagtgactaacaaaatagctacttacctttgcagttctacagaccctgggagctgctttgggagtgagaaaggcaaccctccaatgtgtttcaactttaaaatgttgaattcttttcagacatggtatctcatttattctccttttctagcgtttgttgaatttcaggcagaatgtcttacagaatgtcctagaaccagattatcatttaatctgaaactgctgaggaagggacagagaaggtacaagggcaaggcagcacaaagcagatcaggagaatgaagagggaatgctttggttttttgttttgttttgttttttctttttcaagtaactaaaacagcatctacatgtagagtgttgtggagagctgagaccagggtaaagtcaagtgcagcatcagtactgcgagacccaccagcccctggagagggtcagccgagaatctggtagtgaagcctgtctagggtcccggcaccctcaccctcagccacctgcagagaggccagggccccagagactagcctggttctgaagtgggcaggggtgctgccagagccctctgccccttatgttgagaccctgctttcaggacaggccagccgttggccaccatgtcacattctgagtgagtgtcacaggtccctaacaataattttctgatctggagcatatcagcagaatgcttagcctcaaggggcctggaagctgtaatgtttgatttatgatgagaactatccgaggccacccttggcctctaaataagctgctctagggagccgcctactttttgatgagaaattagaagagtacctaatgttgaaaacatgacatgcgctcttgggatctgctgttctctccagggctccagaacctgatacctgttaccaaagctaggaaagagctttatcacaagccttcactgtcctggcatgagaactggctgccaggctcagtgtaccccattaactgtgaatgaatctgagcttggtttcctttattgcttcctctgcaatatgattgctgaaacacattttaaaaattcagaagcttgtcactcctgttaatgggaggatcagtcacacatgtgtagtacaaggcggactttgtgtttgtttttggtgttaatttttagcattgtgtgtgttgcttccccaccctgaggagaggacaccatggcttactactcaggacaagtatgccccgctcagggtgtgatttcaggtggcttccaaacttgtacgcagtttaaagatggtggggacagactttgcctctacctagtgaaccccacttaaagaataaggagcatttgaatctcttggaaaaggccatgaagaataaagcagtcaaaaagaagtcctccatgttggtgccaaggacttgcgaggggaaataaaaatgttatccagcctgaccaacatggagaaaccccgtctccattaaaaatacaaaattagcctggcatggtggcgcatgcctgtaatcccagctactctggaggctgaggcaggagaatcgcttgaacccaggaggcggaggtcgcagtgagccgagatcatgccagtgcactccagcctgggtaacaagagtgaaactccgtgtcaaaaaaaaaaaaaaaaaaggccacatgtgctcgagctgcaggtcgcggccgctagac

SEQ ID NO: 351 - DNA, 968 bp, Homo sapiens
  misc_feature (587)..(587): n is a, c, g, or t
  misc_feature (690)..(690): n is a, c, g, or t
  misc_feature (707)..(707): n is a, c, g, or t
  misc_feature (714)..(714): n is a, c, g, or t
  misc_feature (764)..(764): n is a, c, g, or t
  misc_feature (772)..(772): n is a, c, g, or t
  misc_feature (811)..(811): n is a, c, g, or t
  misc_feature (830)..(830): n is a, c, g, or t
  misc_feature (845)..(845): n is a, c, g, or t
  misc_feature (847)..(847): n is a, c, g, or t
  misc_feature (860)..(860): n is a, c, g, or t
  misc_feature (864)..(864): n is a, c, g, or t
  misc_feature (875)..(875): n is a, c, g, or t
  misc_feature (877)..(877): n is a, c, g, or t
  misc_feature (879)..(879): n is a, c, g, or t
  misc_feature (882)..(882): n is a, c, g, or t
  misc_feature (886)..(886): n is a, c, g, or t
  misc_feature (895)..(895): n is a, c, g, or t
  misc_feature (905)..(905): n is a, c, g, or t
  misc_feature (919)..(919): n is a, c, g, or t
  misc_feature (922)..(922): n is a, c, g, or t
  misc_feature (924)..(924): n is a, c, g, or t
  misc_feature (926)..(926): n is a, c, g, or t
  misc_feature (928)..(928): n is a, c, g, or t
  misc_feature (936)..(937): n is a, c, g, or t
  misc_feature (945)..(946): n is a, c, g, or t
  misc_feature (950)..(951): n is a, c, g, or t
  misc_feature (957)..(958): n is a, c, g, or t
  misc_feature (964)..(964): n is a, c, g, or t
  nbla-12112-f
gttgttccttggcactgttggcctactggaagatatattgattgcctgccgattgaaccaaaaaaaaggggcatatgatattttcctgaatgcaaaagagcaaaacattgtgtttaatgctgaaacctacagcaatctcattaaattactgatgtcagaagattattttacacaagcaatggaagtgaaagcattcgcggagacccacatcaagggcttcacacttaacgatgctgccaacagccgcctcatcataacgcaagttaggcgggattatttgaaagaggctgtgacaacactgaaaacagtattggatcagcagcagaccccttctaggttagcagtgacccgtgtcatccaggcattggccatgaagggtgatgttgaaaacatagaagtagttcagaagatgttaaatggactcgaagactccattggactttcaaaaatggttttcatcaataacattgctttggctcaaataaagaataataacatagatgccgcaatagaaaacattgaaaatatgcttactttcagagaataaagtcattgaaccccaatacttcggcttggcatacttattnagaaaagtaatagagggagcagttggaaccagcagttgaaaagataagcattcatggcggagagattggccaattcaagttttgcaatttattaaacctgtcnctgattttttcctttcnccttgtnggattgcaaggcaaaggtggattgatgccaagaagctcttcctacagganaatgtggntgccaattgcttgaaccaaaaccccggatttttgttggntggtccctccttaaggaanttcttagggaaaccnanggaaagggccttntaancttgtggaaantntnggngttnaaaaattgntttccctggntttaaattgaaaanggngngnangccttccnnatttcccnnatgnnaaaagnntttttnttct

SEQ ID NO: 352 - DNA, 913 bp, Homo sapiens
  misc_feature (622)..(622): n is a, c, g, or t
  misc_feature (642)..(642): n is a, c, g, or t
  misc_feature (681)..(681): n is a, c, g, or t
  misc_feature (707)..(707): n is a, c, g, or t
  misc_feature (731)..(731): n is a, c, g, or t
  misc_feature (775)..(775): n is a, c, g, or t
  misc_feature (777)..(777): n is a, c, g, or t
  misc_feature (791)..(791): n is a, c, g, or t
  misc_feature (804)..(804): n is a, c, g, or t
  misc_feature (819)..(819): n is a, c, g, or t
  misc_feature (825)..(825): n is a, c, g, or t
  misc_feature (847)..(847): n is a, c, g, or t
  misc_feature (861)..(862): n is a, c, g, or t
  misc_feature (868)..(868): n is a, c, g, or t
  misc_feature (885)..(885): n is a, c, g, or t
  misc_feature (899)..(899): n is a, c, g, or t
  misc_feature (905)..(905): n is a, c, g, or t
  misc_feature (909)..(909): n is a, c, g, or t
  misc_feature (912)..(913): n is a, c, g, or t
  nbla-12112-r1
gtggcctttttttttttttttttatagggatcacttttatttcaaacaattaaatacaaaccaatattttaccccttcatagatgaaatcacatcttttcaggatatgagtataaagtaacaagcctagggcagagcttgtactgacaaagtcctgaaactacaatgagaggaaacacattgctctacttcgggataagtcatgaccgagactcaatttcagagacgctctatgaacagaggtgcttgaagccacagtggcagaagggaaagatggggaagtgtgccgaagagcctccaggcatgacagacagtcccctgaccaagcacaagtaacaggccctttgggtctctgcttctcactggaaaatgatgaagcctagatctgatgactcctagtgccaacatttaacaaagttcgaaagttatgcaggacttcacacatgtacggaatggctgtatcacagaatattatgcgttagaaagttcacggtcactatacctagctctaaaatttttcagagaaacagcagactaataagtgaatcttaaataaaggaataacattttaatgaaataaatgaaacagagcagggaaaccaaagagccaattaggggaagantcctgaaaaagtatggcttnacacagcagcagcattgaagaaaacactatcgatttttnccagagaaaaaaactccaaaaatgtncaataacccaagtgcccagagttntgggtcaaataaagacttttgaaccatgccatcaccacataccntntggtcccttaaagnaaaattttttcantttttttttttcccntcaagntataactttaaaaaataacccntggtgggaccaccnngaatcnccaaaattattttcccnaaaaccaaaagttntcgccntggnttnn

SEQ ID NO: 353 - DNA, 1133 bp, Homo sapiens
  misc_feature (12)..(12): n is a, c, g, or t
  misc_feature (435)..(435): n is a, c, g, or t
  misc_feature (464)..(464): n is a, c, g, or t
  misc_feature (505)..(505): n is a, c, g, or t
  misc_feature (557)..(557): n is a, c, g, or t
  misc_feature (560)..(560): n is a, c, g, or t
  misc_feature (573)..(574): n is a, c, g, or t
  misc_feature (576)..(576): n is a, c, g, or t
  misc_feature (582)..(582): n is a, c, g, or t
  misc_feature (585)..(585): n is a, c, g, or t
  misc_feature (607)..(607): n is a, c, g, or t
  misc_feature (616)..(616): n is a, c, g, or t
  misc_feature (638)..(639): n is a, c, g, or t
  misc_feature (653)..(653): n is a, c, g, or t
  misc_feature (661)..(661): n is a, c, g, or t
  misc_feature (666)..(666): n is a, c, g, or t
  misc_feature (673)..(673): n is a, c, g, or t
  misc_feature (682)..(682): n is a, c, g, or t
  misc_feature (686)..(688): n is a, c, g, or t
  misc_feature (693)..(693): n is a, c, g, or t
  misc_feature (696)..(696): n is a, c, g, or t
  misc_feature (704)..(704): n is a, c, g, or t
  misc_feature (709)..(712): n is a, c, g, or t
  misc_feature (716)..(717): n is a, c, g, or t
  misc_feature (720)..(720): n is a, c, g, or t
  misc_feature (725)..(725): n is a, c, g, or t
  misc_feature (731)..(731): n is a, c, g, or t
  misc_feature (747)..(748): n is a, c, g, or t
  misc_feature (752)..(752): n is a, c, g, or t
  misc_feature (767)..(767): n is a, c, g, or t
  misc_feature (769)..(769): n is a, c, g, or t
  misc_feature (778)..(778): n is a, c, g, or t
  misc_feature (787)..(787): n is a, c, g, or t
  misc_feature (802)..(802): n is a, c, g, or t
  misc_feature (806)..(806): n is a, c, g, or t
  misc_feature (809)..(809): n is a, c, g, or t
  misc_feature (812)..(812): n is a, c, g, or t
  misc_feature (830)..(830): n is a, c, g, or t
  misc_feature (833)..(833): n is a, c, g, or t
  misc_feature (835)..(836): n is a, c, g, or t
  misc_feature (838)..(838): n is a, c, g, or t
  misc_feature (855)..(856): n is a, c, g, or t
  misc_feature (859)..(859): n is a, c, g, or t
  misc_feature (868)..(868): n is a, c, g, or t
  misc_feature (871)..(871): n is a, c, g, or t
  misc_feature (873)..(873): n is a, c, g, or t
  misc_feature (882)..(882): n is a, c, g, or t
  misc_feature (884)..(885): n is a, c, g, or t
  misc_feature (890)..(890): n is a, c, g, or t
  misc_feature (892)..(892): n is a, c, g, or t
  misc_feature (894)..(894): n is a, c, g, or t
  misc_feature (896)..(896): n is a, c, g, or t
  misc_feature (902)..(902): n is a, c, g, or t
  misc_feature (906)..(906): n is a, c, g, or t
  misc_feature (910)..(910): n is a, c, g, or t
  misc_feature (928)..(928): n is a, c, g, or t
  misc_feature (936)..(938): n is a, c, g, or t
  misc_feature (946)..(946): n is a, c, g, or t
  misc_feature (952)..(952): n is a, c, g, or t
  misc_feature (960)..(961): n is a, c, g, or t
  misc_feature (963)..(965): n is a, c, g, or t
  misc_feature (975)..(976): n is a, c, g, or t
  misc_feature (982)..(982): n is a, c, g, or t
  misc_feature (989)..(989): n is a, c, g, or t
  misc_feature (991)..(991): n is a, c, g, or t
  misc_feature (1002)..(1002): n is a, c, g, or t
  misc_feature (1010)..(1011): n is a, c, g, or t
  misc_feature (1018)..(1018): n is a, c, g, or t
  misc_feature (1022)..(1022): n is a, c, g, or t
  misc_feature (1033)..(1033): n is a, c, g, or t
  misc_feature (1046)..(1046): n is a, c, g, or t
  misc_feature (1059)..(1060): n is a, c, g, or t
  misc_feature (1066)..(1066): n is a, c, g, or t
  misc_feature (1071)..(1071): n is a, c, g, or t
  misc_feature (1079)..(1079): n is a, c, g, or t
  misc_feature (1087)..(1087): n is a, c, g, or t
  misc_feature (1095)..(1096): n is a, c, g, or t
  misc_feature (1101)..(1102): n is a, c, g, or t
  misc_feature (1105)..(1105): n is a, c, g, or t
  misc_feature (1117)..(1117): n is a, c, g, or t
  misc_feature (1121)..(1121): n is a, c, g, or t
  misc_feature (1125)..(1125): n is a, c, g, or t
  nbla-12119-f
gttgattcctcngcactgttggcctactggaagtttaaggaattttagtatgtaatagcaaagtgtttgattaaaagtctaatcctatattactagtcaaaattagttacattctgatctaggaaagataatagtcattggatattgatatgctgtgctgtcagaaaaccagactaagatagaaacctctatctgactcccacatgttgcttgttgtgatgggatgtatactttacagcagcttattgctgctttgaaaaaaaatgtataaactatacatttggagtgtttgcatataattctttataacctccacttaaagctgtcagacattggtattttatcagtccacattgttgaataaaactaatgttcttaggaatccagcttgtacacactgtttaaaaaccctcagggacagtttacacactcttntcactcaattcaggtactttgatgctatncttaaacctaacagtgacttgtatttttctgttttgctttnatttcaacgtgctggtagcacatctgatgaatgtcaacttaaaaaactcagntcnagggtatccaggnntnactcanccnaacagattttaaagctggcctnttaactctncagcacatgggtgcctcacacnncttataagtgggcnttcctatntaatncaggtcntttacttcnctgnnnccagnatnaatcattnggggnnnncccnngtntacanaagggnctatcttttttcaaannaaanaaggccgccttttantnttgtttttnggtccaggnctatcaacttttcancacnacnctntctcttaagaacccttgngcncnntngttttaaacaactcttnnttntttttctanaanantggggcccncnntaatntnangnccctangctnacanaactcatttgttaaagcnaatctgtnnntctcttancctctnacaatctnngnnnctcctcgggnnaagcgncccgggngngtaaaaccaangaaaattnngccacgngctntcccttttttntatactcggactntcatgtgggcctnncatctntgagngtttattncttcttcnctagcgtnngtaannacntcctaccccttncttnatanaaacctct

SEQ ID NO: 354 - DNA, 952 bp, Homo sapiens
  misc_feature (3)..(4): n is a, c, g, or t
  misc_feature (127)..(127): n is a, c, g, or t
  misc_feature (358)..(358): n is a, c, g, or t
  misc_feature (398)..(398): n is a, c, g, or t
  misc_feature (435)..(435): n is a, c, g, or t
  misc_feature (478)..(478): n is a, c, g, or t
  misc_feature (505)..(505): n is a, c, g, or t
  misc_feature (568)..(568): n is a, c, g, or t
  misc_feature (576)..(576): n is a, c, g, or t
  misc_feature (599)..(599): n is a, c, g, or t
  misc_feature (726)..(726): n is a, c, g, or t
  misc_feature (745)..(745): n is a, c, g, or t
  misc_feature (761)..(761): n is a, c, g, or t
  misc_feature (817)..(818): n is a, c, g, or t
  misc_feature (846)..(846): n is a, c, g, or t
  misc_feature (858)..(858): n is a, c, g, or t
  misc_feature (882)..(882): n is a, c, g, or t
  misc_feature (923)..(923): n is a, c, g, or t
  misc_feature (931)..(931): n is a, c, g, or t
  nbla-12119-r1
ggnnagttggggcctttttttttttttttttttttttccaacaaaatttattagaagaatagtggttttgaaaactctagcatccagtgagaactaccatacacaacattacagctgggaatgtttntccaaaatgtcatggtcaaataatacaatggaaccattaaatcttacacatgcacgaaagaacaagcgcttttgacatacaatgcaaaaaaaaaaaaaaggggggggaccacatggattaaaattttaagtactcatcacatacattaagacacagttttagtccagtcaaaaatcagaactgcattaaaaaatttaatgtagtgcaatcaaaccaaaaaacttaatttgngatcataagtgctctactacataaacattgatcatagcanggaacaaaaagttcaaatcacacagtacaaaaaaatntgtaaataaatataaactacagtccaagagaaatattaaattntacaattccatcaaactgtaaacagtntattgaaatgaggtccataagagtaaagggggttcctgttttgttgtatgacacttgaacttntagaaatntgaaagataccattttccatatntccaaaggctatgggttttatatgtggagagaatttattttagatgtaagatttcaaatattaaagcagagaaataatctatttttgttaaccacagaatagtactgcagaaaaacaaaaaagcaanttttaaaggaggcaaggtntttaaccattttaaangatgccaaaagggacttaaaaacaactgggaaatttaggaaacttttgccattcannaaaaaaaaacttttgttaaccttggaanaacctttcaaanggggttaccaaaaaataacccccngggccaaaaaaacttggtcttggcttggattatttgccaanacccctanaaaccctttttggttttaatt

SEQ ID NO: 355 - DNA, 957 bp, Homo sapiens
  misc_feature (10)..(10): n is a, c, g, or t
  misc_feature (634)..(634): n is a, c, g, or t
  misc_feature (659)..(659): n is a, c, g, or t
  misc_feature (706)..(706): n is a, c, g, or t
  misc_feature (708)..(708): n is a, c, g, or t
  misc_feature (731)..(731): n is a, c, g, or t
  misc_feature (739)..(739): n is a, c, g, or t
  misc_feature (759)..(759): n is a, c, g, or t
  misc_feature (782)..(782): n is a, c, g, or t
  misc_feature (806)..(806): n is a, c, g, or t
  misc_feature (810)..(810): n is a, c, g, or t
  misc_feature (815)..(816): n is a, c, g, or t
  misc_feature (820)..(820): n is a, c, g, or t
  misc_feature (832)..(832): n is a, c, g, or t
  misc_feature (848)..(848): n is a, c, g, or t
  misc_feature (865)..(866): n is a, c, g, or t
  misc_feature (879)..(879): n is a, c, g, or t
  misc_feature (881)..(881): n is a, c, g, or t
  misc_feature (885)..(885): n is a, c, g, or t
  misc_feature (888)..(888): n is a, c, g, or t
  misc_feature (891)..(891): n is a, c, g, or t
  misc_feature (893)..(893): n is a, c, g, or t
  misc_feature (899)..(900): n is a, c, g, or t
  misc_feature (935)..(936): n is a, c, g, or t
  misc_feature (955)..(955): n is a, c, g, or t
  nbla-12121-f
gtgttcctcngcactgttggcctactgggtcatgagacttattcactatcacaagaacagttcaggaaagacctgccctcatgattcaattaccttccaccaggtccctcccacaacatgtggaaattcaagatgagatttgggtgggaacatagccaaaccatatcaacctctttaataaatatttgttgaataaataaatgaatacatggacgaacgtttcttcagcctttactgcctggtgcaagttgagtgggaattctgcctctagtgcatccttgttgccaagagagacgcagttctgctgctgccaccagatgcatttctctgccaatgtgttggtgcaggctaatggaaatgcactgctgctcctacatcttccttgtggatcttcatcctccttccccatgcttttcaaaaaatgagatgactacttctctcttctatattatttattctctgcttggctgggggcagtagaatgggttgaattctcacagcaagattacttggttcctaaatttttttttagcaattattgtgacagctctttcaatgaatatctatggttctattactctccagggagcacacacacctccatagtgtcttcaaaaggatttgggtttggatnagaacaagcagccatgctcaagccntggtctacctcttccttctgacctttatgcattgtttataaagtcangntcactgtgacaacattcatttcntttccttnttgatgaattttctttcaangggctttattaacccttcccttnacaaactgggctttctggccaatnccanccatnnttangtcttgttgggncacaattctttgggcnaagttttggttttattnnagggatttcaagncntttnttnttntnaaaagnnttctttcaatttttttattggtaaaccaacctttnngcccaatggggggaacacnac

SEQ ID NO: 356 - DNA, 891 bp, Homo sapiens
  misc_feature (3)..(4): n is a, c, g, or t
  misc_feature (689)..(689): n is a, c, g, or t
  misc_feature (694)..(694): n is a, c, g, or t
  misc_feature (719)..(719): n is a, c, g, or t
  misc_feature (781)..(781): n is a, c, g, or t
  misc_feature (784)..(784): n is a, c, g, or t
  misc_feature (850)..(850): n is a, c, g, or t
  misc_feature (860)..(860): n is a, c, g, or t
  misc_feature (865)..(865): n is a, c, g, or t
  misc_feature (870)..(870): n is a, c, g, or t
  misc_feature (888)..(888): n is a, c, g, or t
  nbla-12121-r1
ggnnagttggggccttttttttttttttttttgtagagatagggtctcactatgttgcctaagctcgtctcaaactcatgggctcaagtaatcctccttcctcagcctcccaaactgctaggatcacaggcgtgagctgctgcacctagccagaagatcaattttgatacacactatggtatcaattgaattttttatatatttgactgtggagaaaataatggactgaaaaccctagcgttcttactttgaaatccatcactgcatgtgcaatgaggtcataatcaagggtggtgaggataccgagtcaggtctattctggaaaatgcagtcctcctctgaaggagaaggtttgtctcaagaagtcagcatcaaccttttaatctttctataattgcatgctgtctaagttttttccatccaaccttccctctcttctttgcaagtgtaagactgtcatccaactctgatggctctcctggcctcctctaacttcccatttttcctcacaggtatttcccctcatacataacttgcatgtctaatcctgtcttggagtctgattctcatagacctcagcctaacaaaaatggcaccagaagtggtccaagaaaacaaacagtataatagagatataggaacggctcatataccaccaagtgggcaaaaagaacagtatcctgactggnggatngtgacacattgtcccttgaatcaanaatggtaaagaactctagctcaatatttaggtagattcagcagtggaattatctaaccaagnggncctatactgggcctttacaaccaaaatttaacagcttcatggtttggcttttctttaatactattnccctcttttntttgngaaanccaattattttttttttnttg

SEQ ID NO: 357 - DNA, 978 bp, Homo sapiens
  misc_feature (634)..(634): n is a, c, g, or t
  misc_feature (686)..(686): n is a, c, g, or t
  misc_feature (699)..(699): n is a, c, g, or t
  misc_feature (712)..(712): n is a, c, g, or t
  misc_feature (722)..(722): n is a, c, g, or t
  misc_feature (736)..(737): n is a, c, g, or t
  misc_feature (747)..(747): n is a, c, g, or t
  misc_feature (785)..(785): n is a, c, g, or t
  misc_feature (791)..(791): n is a, c, g, or t
  misc_feature (793)..(794): n is a, c, g, or t
  misc_feature (796)..(796): n is a, c, g, or t
  misc_feature (798)..(798): n is a, c, g, or t
  misc_feature (818)..(818): n is a, c, g, or t
  misc_feature (823)..(823): n is a, c, g, or t
  misc_feature (832)..(832): n is a, c, g, or t
  misc_feature (843)..(843): n is a, c, g, or t
  misc_feature (846)..(846): n is a, c, g, or t
  misc_feature (854)..(854): n is a, c, g, or t
  misc_feature (856)..(856): n is a, c, g, or t
  misc_feature (860)..(860): n is a, c, g, or t
  misc_feature (863)..(864): n is a, c, g, or t
  misc_feature (875)..(875): n is a, c, g, or t
  misc_feature (878)..(878): n is a, c, g, or t
  misc_feature (891)..(891): n is a, c, g, or t
  misc_feature (909)..(909): n is a, c, g, or t
  misc_feature (912)..(912): n is a, c, g, or t
  misc_feature (917)..(917): n is a, c, g, or t
  misc_feature (923)..(925): n is a, c, g, or t
  misc_feature (934)..(934): n is a, c, g, or t
  misc_feature (947)..(947): n is a, c, g, or t
  misc_feature (949)..(949): n is a, c, g, or t
  misc_feature (951)..(951): n is a, c, g, or t
  misc_feature (957)..(957): n is a, c, g, or t
  misc_feature (959)..(959): n is a, c, g, or t
  misc_feature (970)..(971): n is a, c, g, or t
  misc_feature (977)..(977): n is a, c, g, or t
  nbla-12124-f
gttgttcctcggcactgttggcctactggtgctgttgctatggtgaaaacaaatcaatatcacatggctaccagccagtcccgcgctcagggagtgccatagaaattcaagatcaggtactcaagattccaagcaagaattgggaaaagaggatttagatgctgagcttaagagaattccttatagtagaataagtaggttcaatctctcatgcattttctcttccttttttcctgtactttcctaccgataacaagaaaaagatgaaaaggaaggtatactgatttgtttacatttccaaaatgacaaaacagattatcaacatagaaataggttggcaacattgcaaggggtgaaggattctgattcgggaaaaggtggataactacaagacatgttggttgttgaaaacatagttttgggggcctttaccatcttcaggtacagctacatgtcagagctggctgggttgtgccaagcagagaaacctggcaactctagggggcaggtgggcagtggagataaagggggttataaaaaggtagggaggtgtgggcataaaaatcaacaagcaagaaagcccagagagagctgcagggtcaagagtcaggccaggcaagcacaggatccctgnggcatggcagaacagggagaggacagtttcgccctgttcacgaaatctgttnaagacccaagctnaagggctagccanagaaaggcangaaaatagcttgcnnagaggaagtnaaggtgtcatggggcccaggccttccttttcccggaanggggtncnncntncaaccttggttgaaccattnggttnccccccctnggttgggggangangccaaaanancttnggnnattttttaaangcntttggggtttccnttttccaaaaaaaaattnaanggccngggaannnactttttanccgggctttttgntnanatttantnttaaccttccnntttttnt

SEQ ID NO: 358 - DNA, 916 bp, Homo sapiens
  misc_feature (3)..(4): n is a, c, g, or t
  misc_feature (46)..(46): n is a, c, g, or t
  misc_feature (181)..(181): n is a, c, g, or t
  misc_feature (670)..(670): n is a, c, g, or t
  misc_feature (727)..(727): n is a, c, g, or t
  misc_feature (730)..(730): n is a, c, g, or t
  misc_feature (747)..(747): n is a, c, g, or t
  misc_feature (780)..(780): n is a, c, g, or t
  misc_feature (816)..(817): n is a, c, g, or t
  misc_feature (823)..(823): n is a, c, g, or t
  misc_feature (839)..(839): n is a, c, g, or t
  misc_feature (841)..(842): n is a, c, g, or t
  misc_feature (856)..(856): n is a, c, g, or t
  misc_feature (863)..(863): n is a, c, g, or t
  misc_feature (875)..(875): n is a, c, g, or t
  misc_feature (879)..(879): n is a, c, g, or t
  misc_feature (882)..(882): n is a, c, g, or t
  misc_feature (897)..(897): n is a, c, g, or t
  misc_feature (913)..(913): n is a, c, g, or t
  misc_feature (916)..(916): n is a, c, g, or t
  nbla-12124-r1
ggnnagttggggccttttttttttttttttttgattttttttttgnttttttttttgtaactctgcttttaaggaaaaagggggaaagcgaaattctgcagagtcaggaaacaggtttccttgctagagatagagacagtgagataaaggcatggggcttcccccacaccctgcagctcanaagtgtgggacaggagtctaagacttcctgttgttggctggtatttacagctttttagatgatatgtccattttccccaggcactttggggccaaaactcagtatgctgagactcagaaattgctctcagtagcttcatattttgatttttttttgcaccattcttatctatctattgctcatctgacatctttatatgttatttaaacagtacttatctggagaaatataacagaggtcaagaaagtacatacatacagatacctaaaactcaaaagtccatctcttgttctcccccaatcactaaaactgccccaagcctaaaattaatctgatggttaacattgctaaattaatattagccaataaagttattcaagtctttgaaacttacaattttgcatcatttatttttgtcacacacacaaaggcaggtattaggttactgagttgggtttctcaccaaatagcaaagccagggaagcccanaggtgtttaataaaccttgttgactgattgatgggaatatactacctagtttaattnaancaatgcattcttttggnaaaaacactaagggtaatttattttgggtcccnctttttttttaccccaagccggttttcttgcttgtnnttgganggaagggccagggccnannccccaaaaaaattnggtcccntttaaagccttnaagnagntttaagggttttacnaaaaaagaaaaaaccnttn

SEQ ID NO: 359 - DNA, 970 bp, Homo sapiens
  misc_feature (5)..(5): n is a, c, g, or t
  misc_feature (10)..(10): n is a, c, g, or t
  misc_feature (689)..(689): n is a, c, g, or t
  misc_feature (736)..(736): n is a, c, g, or t
  misc_feature (751)..(751): n is a, c, g, or t
  misc_feature (756)..(756): n is a, c, g, or t
  misc_feature (791)..(791): n is a, c, g, or t
  misc_feature (802)..(802): n is a, c, g, or t
  misc_feature (806)..(806): n is a, c, g, or t
  misc_feature (829)..(829): n is a, c, g, or t
  misc_feature (837)..(837): n is a, c, g, or t
  misc_feature (855)..(855): n is a, c, g, or t
  misc_feature (877)..(877): n is a, c, g, or t
  misc_feature (895)..(895): n is a, c, g, or t
  misc_feature (922)..(923): n is a, c, g, or t
  misc_feature (926)..(926): n is a, c, g, or t
  misc_feature (931)..(932): n is a, c, g, or t
  misc_feature (943)..(943): n is a, c, g, or t
  misc_feature (967)..(967): n is a, c, g, or t
  misc_feature (969)..(969): n is a, c, g, or t
  nbla-12137-f
gttgntcctnggcctgttggcctactggataacctgtttcggaatagtctcaagatgctgcttactggtgggaaatcaagtcgtaaaaacaggtcaagtggtggcatctccacagaaagcgactgtgcttttgagccagactacgctgtcccgccacttccagtgagtgaaggtatgcagcacattcggattatggagggcatgtctcgctctcttccatcctcccccttactcacacatcagtctatcagtgttcggctccagcctgtgaagaagttaactggtgatgctgaacaggagcttggcccccctccatctgtagatgaggcagcaaacacactcatgactcgtctgggtttcctccttggagagaaagtcacagaagttcagccaggtgaccaatacagcatggaagtacaggatgaaaatcagacctcagcaatcacccagcggataagtccttgttccactctgactagcagcactgcctctccaccagccagtagcccctgctctacactcccacccatcagtacaaatgcaactgccaaggactgcagctatggggctgttactagtccaacctctacccttgaaagcagagatagtggcatcattgctacattaacaagctattctgaaaatgtggaacgcacaaaatatgctgggggaaagcagtaaagaattangatctggaggaaaacataaaaccttgggcaattttcaaaaaatccancatgggacctcctgntttgntattcggagtagattgaaaaacattaacttgcttnccaccctattnagtncttggaataaagaatccccacangaagaaanttttgggaaaacagtggnttaattcttaaatcaagtacanggctaatttccttttggnaatcttaaatggcccccggggccaaannttnagttnngcaggccaccnagtttttgccccactttgggaaanant

SEQ ID NO: 360 - DNA, 950 bp, Homo sapiens
  misc_feature (655)..(655): n is a, c, g, or t
  misc_feature (703)..(703): n is a, c, g, or t
  misc_feature (730)..(731): n is a, c, g, or t
  misc_feature (736)..(737): n is a, c, g, or t
  misc_feature (766)..(766): n is a, c, g, or t
  misc_feature (790)..(790): n is a, c, g, or t
  misc_feature (796)..(796): n is a, c, g, or t
  misc_feature (798)..(798): n is a, c, g, or t
  misc_feature (802)..(802): n is a, c, g, or t
  misc_feature (807)..(807): n is a, c, g, or t
  misc_feature (826)..(826): n is a, c, g, or t
  misc_feature (843)..(843): n is a, c, g, or t
  misc_feature (851)..(851): n is a, c, g, or t
  misc_feature (872)..(872): n is a, c, g, or t
  misc_feature (878)..(878): n is a, c, g, or t
  misc_feature (881)..(881): n is a, c, g, or t
  misc_feature (884)..(884): n is a, c, g, or t
  misc_feature (886)..(886): n is a, c, g, or t
  misc_feature (888)..(889): n is a, c, g, or t
  misc_feature (894)..(894): n is a, c, g, or t
  misc_feature (896)..(896): n is a, c, g, or t
  misc_feature (899)..(899): n is a, c, g, or t
  misc_feature (918)..(918): n is a, c, g, or t
  misc_feature (924)..(924): n is a, c, g, or t
  misc_feature (934)..(935): n is a, c, g, or t
  nbla-12137-r1
tgtggccttttttttttttttttggactttggaatatttgcatatatataatgaaagatcttggtgataggacttgggtctaaacaagaaattcatatgtttcatacacaccttatacacatagcttgaaggtaattttactcaacattttgtgaaacaaagttttcactgcaacccatcacatgaagctaggtgtggaattttccacttgtggtgtcatgttggcactcagaaagtttttgatttcgaagcattttgcattttggattttcagattagggatgctcaacctgtacattatgatcagcacagttcacctgcaatatggctagggctgaatctggtccgcagtcacttctgaaatccaagatcttagaaaggttatttcccccattaccacagcccctttacatctgttttctttcagaatttcgaggaactaatgcttccaaatgttgataattacacaatgcctgtctatgaggagtacaatgtatttgtgtttatctttctctagactcagcagaaatgaactggtcacatgctaaaatggatcatttcacttcttagggaggtttaagtaagtatgggaataggagacaaagcaactttttggctttttgcccatttccatctgttcccgggcaccctttanagcccttctgtggttctaacctcttaaaatccctgctgtgtgcgagcncccccccatgctctgtcttggcattcnntagannaagttcctcaaagggtgttattgttcttntggctcattcccagggttaagcanaggggncntttncaaangtggggccacgaaccctcnggtgggcctggccttanctggaaanttttgggccccgcgtgggccnttgganganttncnannggggnanttncgcccctggtcccttgganttgggnaaaaaaaacnnccttggtttttccca

SEQ ID NO: 361 - DNA, 980 bp, Homo sapiens
  misc_feature (2)..(2): n is a, c, g, or t
  misc_feature (12)..(12): n is a, c, g, or t
  misc_feature (764)..(764): n is a, c, g, or t
  misc_feature (772)..(772): n is a, c, g, or t
  misc_feature (779)..(779): n is a, c, g, or t
  misc_feature (791)..(792): n is a, c, g, or t
  misc_feature (795)..(795): n is a, c, g, or t
  misc_feature (806)..(807): n is a, c, g, or t
  misc_feature (815)..(815): n is a, c, g, or t
  misc_feature (825)..(825): n is a, c, g, or t
  misc_feature (834)..(834): n is a, c, g, or t
  misc_feature (842)..(842): n is a, c, g, or t
  misc_feature (846)..(846): n is a, c, g, or t
  misc_feature (848)..(849): n is a, c, g, or t
  misc_feature (851)..(851): n is a, c, g, or t
  misc_feature (860)..(860): n is a, c, g, or t
  misc_feature (876)..(876): n is a, c, g, or t
  misc_feature (907)..(907): n is a, c, g, or t
  misc_feature (917)..(917): n is a, c, g, or t
  misc_feature (923)..(923): n is a, c, g, or t
  misc_feature (930)..(930): n is a, c, g, or t
  nbla-12156-f
gntgattcctcngcctgttggcctactggcattttgagttgttctagtggtatatgaaggaggctgggataactagcttgaaagaaattcagtctagttatagacatctttggcattaatctgatgtttactagtgatatctcatgctaggcagttatgctttgcttctaggggcttctctttttaaaacaaaagaaagctcttttcgttttctgtgtgctgcatgctccagtgtgtgtgtttacaccatcggttcttctccctctagagattagcataactccctttgctgttggattgttattttgagcaatatgttttggaaaggttggttttcatcatgagtgcacgcaaatcatcagatgcatctgcttgctcctcttcagaaatatctgattcctttgtgaaagagtttctagccaaagccaaagaagactttttgaaaaaatgggagaatccaactcagaataatgccggacttgaagattttgaaaggaaaaaaacccttggaacaggttcatttggaagagtcatgttggtaaaacacaaagccactgaacagtattatgccatgaagatcttagataagcagaaggttgttaaactgaagcaaatagagcatactttgaatgagaaaagaatattacaggcagtgaatttttcctttccttgttcgactggagtatgcttttaagggataattctaaatttataccatgggttatggaatatgtcccctgggggggtgaaaatgttttcacatnctaaaaangaaattnggaaagggttcnngtngagccccccannccccgggnttcttatgcnagcctccanaataaggnggcntnncnattttcggngtacccttccctttcnacttaggacccctcattttttccgggaggantcttaaaaanccctgngaaaaantcttcttttaaatttggacccccttcaaaggggcttttttttccccgccg

SEQ ID NO: 362 - DNA, 942 bp, Homo sapiens
  misc_feature (1)..(1): n is a, c, g, or t
  misc_feature (31)..(31): n is a, c, g, or t
  misc_feature (37)..(38): n is a, c, g, or t
  misc_feature (41)..(42): n is a, c, g, or t
  misc_feature (46)..(46): n is a, c, g, or t
  misc_feature (48)..(48): n is a, c, g, or t
  misc_feature (51)..(51): n is a, c, g, or t
  misc_feature (54)..(54): n is a, c, g, or t
  misc_feature (59)..(59): n is a, c, g, or t
  misc_feature (61)..(61): n is a, c, g, or t
  misc_feature (67)..(68): n is a, c, g, or t
  misc_feature (72)..(72): n is a, c, g, or t
  misc_feature (75)..(75): n is a, c, g, or t
  misc_feature (77)..(78): n is a, c, g, or t
  misc_feature (81)..(81): n is a, c, g, or t
  misc_feature (84)..(84): n is a, c, g, or t
  misc_feature (86)..(88): n is a, c, g, or t
  misc_feature (90)..(90): n is a, c, g, or t
  misc_feature (94)..(94): n is a, c, g, or t
  misc_feature (96)..(96): n is a, c, g, or t
  misc_feature (107)..(107): n is a, c, g, or t
  misc_feature (110)..(111): n is a, c, g, or t
  misc_feature (115)..(117): n is a, c, g, or t
  misc_feature (119)..(120): n is a, c, g, or t
  misc_feature (124)..(124): n is a, c, g, or t
  misc_feature (126)..(126): n is a, c, g, or t
  misc_feature (130)..(134): n is a, c, g, or t
  misc_feature (136)..(136): n is a, c, g, or t
  misc_feature (148)..(149): n is a, c, g, or t
  misc_feature (151)..(153): n is a, c, g, or t
  misc_feature (158)..(158): n is a, c, g, or t
  misc_feature (161)..(161): n is a, c, g, or t
  misc_feature (165)..(165): n is a, c, g, or t
  misc_feature (172)..(176): n is a, c, g, or t
  misc_feature (181)..(186): n is a, c, g, or t
  misc_feature (188)..(188): n is a, c, g, or t
  misc_feature (190)..(190): n is a, c, g, or t
  misc_feature (194)..(194): n is a, c, g, or t
  misc_feature (201)..(202): n is a, c, g, or t
  misc_feature (225)..(225): n is a, c, g, or t
  misc_feature (230)..(231): n is a, c, g, or t
  misc_feature (233)..(234): n is a, c, g, or t
  misc_feature (237)..(237): n is a, c, g, or t
  misc_feature (240)..(240): n is a, c, g, or t
  misc_feature (245)..(246): n is a, c, g, or t
  misc_feature (249)..(249): n is a, c, g, or t
  misc_feature (253)..(253): n is a, c, g, or t
  misc_feature (257)..(257): n is a, c, g, or t
  misc_feature (263)..(263): n is a, c, g, or t
  misc_feature (266)..(268): n is a, c, g, or t
  misc_feature (270)..(270): n is a, c, g, or t
  misc_feature (273)..(275): n is a, c, g, or t
  misc_feature (279)..(279): n is a, c, g, or t
  misc_feature (282)..(282): n is a, c, g, or t
  misc_feature (289)..(290): n is a, c, g, or t
  misc_feature (295)..(297): n is a, c, g, or t
  misc_feature (306)..(306): n is a, c, g, or t
  misc_feature (310)..(310): n is a, c, g, or t
  misc_feature (316)..(317): n is a, c, g, or t
  misc_feature (320)..(320): n is a, c, g, or t
  misc_feature (323)..(323): n is a, c, g, or t
  misc_feature (325)..(325): n is a, c, g, or t
  misc_feature (331)..(331): n is a, c, g, or t
  misc_feature (336)..(336): n is a, c, g, or t
  misc_feature (340)..(341): n is a, c, g, or t
  misc_feature (344)..(346): n is a, c, g, or t
  misc_feature (348)..(348): n is a, c, g, or t
  misc_feature (350)..(350): n is a, c, g, or t
  misc_feature (352)..(352): n is a, c, g, or t
  misc_feature (355)..(355): n is a, c, g, or t
  misc_feature (358)..(358): n is a, c, g, or t
  misc_feature (365)..(365): n is a, c, g, or t
  misc_feature (369)..(369): n is a, c, g, or t
  misc_feature (385)..(386): n is a, c, g, or t
  misc_feature (407)..(408): n is a, c, g, or t
  misc_feature (418)..(418): n is a, c, g, or t
  misc_feature (421)..(421): n is a, c, g, or t
  misc_feature (427)..(427): n is a, c, g, or t
  misc_feature (429)..(433): n is a, c, g, or t
  misc_feature (437)..(437): n is a, c, g, or t
  misc_feature (439)..(439): n is a, c, g, or t
  misc_feature (445)..(446): n is a, c, g, or t
  misc_feature (456)..(457): n is a, c, g, or t
  misc_feature (466)..(466): n is a, c, g, or t
  misc_feature (469)..(471): n is a, c, g, or t
  misc_feature (485)..(486): n is a, c, g, or t
  misc_feature (489)..(489): n is a, c, g, or t
  misc_feature (493)..(493): n is a, c, g, or t
  misc_feature (502)..(502): n is a, c, g, or t
  misc_feature (504)..(505): n is a, c, g, or t
  misc_feature (508)..(508): n is a, c, g, or t
  misc_feature (514)..(514): n is a, c, g, or t
  misc_feature (519)..(519): n is a, c, g, or t
  misc_feature (524)..(525): n is a, c, g, or t
  misc_feature (527)..(527): n is a, c, g, or t
  misc_feature (529)..(529): n is a, c, g, or t
  misc_feature (531)..(531): n is a, c, g, or t
  misc_feature (535)..(535): n is a, c, g, or t
  misc_feature (539)..(539): n is a, c, g, or t
  misc_feature (548)..(549): n is a, c, g, or t
  misc_feature (552)..(553): n is a, c, g, or t
  misc_feature (587)..(589): n is a, c, g, or t
  misc_feature (591)..(591): n is a, c, g, or t
  misc_feature (594)..(594): n is a, c, g, or t
  misc_feature (609)..(609): n is a, c, g, or t
  misc_feature (613)..(614): n is a, c, g, or t
  misc_feature (619)..(620): n is a, c, g, or t
  misc_feature (622)..(622): n is a, c, g, or t
  misc_feature (651)..(651): n is a, c, g, or t
  misc_feature (655)..(655): n is a, c, g, or t
  misc_feature (663)..(663): n is a, c, g, or t
  misc_feature (669)..(669): n is a, c, g, or t
  misc_feature (677)..(677): n is a, c, g, or t
  misc_feature (686)..(686): n is a, c, g, or t
  misc_feature (714)..(715): n is a, c, g, or t
  misc_feature (718)..(718): n is a, c, g, or t
  misc_feature (727)..(727): n is a, c, g, or t
  misc_feature (734)..(734): n is a, c, g, or t
  misc_feature (741)..(741): n is a, c, g, or t
  misc_feature (744)..(744): n is a, c, g, or t
  misc_feature (747)..(747): n is a, c, g, or t
  misc_feature (752)..(752): n is a, c, g, or t
  misc_feature (758)..(760): n is a, c, g, or t
  misc_feature (763)..(763): n is a, c, g, or t
  misc_feature (777)..(777): n is a, c, g, or t
  misc_feature (789)..(790): n is a, c, g, or t
  misc_feature (798)..(798): n is a, c, g, or t
  misc_feature (803)..(803): n is a, c, g, or t
  misc_feature (806)..(806): n is a, c, g, or t
  misc_feature (812)..(812): n is a, c, g, or t
  misc_feature (819)..(819): n is a, c, g, or t
  misc_feature (833)..(833): n is a, c, g, or t
  misc_feature (841)..(843): n is a, c, g, or t
  misc_feature (845)..(845): n is a, c, g, or t
  misc_feature (852)..(852): n is a, c, g, or t
  misc_feature (855)..(855): n is a, c, g, or t
  misc_feature (859)..(859): n is a, c, g, or t
  misc_feature (870)..(870): n is a, c, g, or t
  misc_feature (876)..(876): n is a, c, g, or t
  misc_feature (891)..(891): n is a, c, g, or t
  misc_feature (901)..(901): n is a, c, g, or t
  misc_feature (908)..(908): n is a, c, g, or t
  misc_feature (914)..(914): n is a, c, g, or t
  misc_feature (922)..(922): n is a, c, g, or t
  misc_feature (924)..(924): n is a, c, g, or t
  misc_feature (931)..(931): n is a, c, g, or t
  misc_feature (934)..(934): n is a, c, g, or t
  misc_feature (936)..(936): n is a, c, g, or t
  nbla-12156-r1
ngtggccttttttttttttttttggggtttngaaccnnagnnttantnggnaangggtnantccatnntacnttncnntantcnannncntttnangggcaaaattnccnntttnnngnntttncntttnnnnnantaaggggggtannannnggggntantttnttttccnnnnnggggnnnnnnantngggncctttannttaaaaaccaaaggtcccccaantttcnngnnttnttnttaannaanggangggnaaaccnaannntnggnnnttantanggttttnnggggnnntttttttangggncccagnnttnaancngttttnatttnaaannttnnncngntnttnaantccaaantttnaaggttggttttaaanngatttttttttcttaaccggnngattttaaanttnacccantnnnnngggntnggcaanncggggccatnncttaaaatngannnccctttatttttanntancccngtttttttnannaanggtaantttanttttnncngntncctngttnaaaaatggnnttnnttttttgattttaattaaaggtatttttggtaannntncangacctttttaatccngccnnttaanngnttggaaccattttttttaccatttccatncttngttttggntttagnaaaaaatntttcttccnttggggattttaaaggggattttgggtnntcnccatcattnttaaatntggaccnttntanccctntttggnnngtnttcccctttttttnaaaaattttttnnaaaaaaanaaaanacnacctgncctttgngctgggggtaaaanttttttcnnnanaaaaagnttngggntttgggttccnttttancaaaaagaggttttntttttcccanaaaaccnaaaccnttttttcntntaaaaantcngnggaccg

SEQ ID NO: 363 - DNA, 727 bp, Homo sapiens
  misc_feature (2)..(2): n is a, c, g, or t
  nbla-12204-f
gnttgattcctcggcactgttggcctactggcaatcaagtaattttattagcttcttttggaccctctaaatattgacttctctcatgaaaaaataaattgatgaaactaatgattacaaagatataatcattttttaaaaagtgattgcccaatgtatttctctaacaattgtcacaagagaaagcataacaataaaaatacaaaaacatacagatttagatgtaaaatctatataagctatatttttagggaggctaagcagatagtattactgtggaagaattatcaagttttattcacctcaaatcccactgggttcttaaaacttgaaaattcaaattgtagagaattatgagacacaatgtgatgtttagttaaagtcatgctatacctttctgggccacatattgctaactctgtggctaattatgcaattaattctcaacgtatcaaagcttttcactggcagtaaattctttgccctcaggtgaagtggattgaaaagacatcaaggatcaaggataatcactttgaatctgttagtttttccccctacattccagacactttaaatttggatgctttcattttttttaaatcaaaccacacaaatatgcagatactttcccagaatttcgcagttaaatggctgatcctcttgaaaactaaccttaatggaattctaaacatttcagtttagaatgactttgaaaaattccttagat

SEQ ID NO: 364 - DNA, 709 bp, Homo sapiens
  misc_feature (3)..(5): n is a, c, g, or t
  misc_feature (7)..(7): n is a, c, g, or t
  misc_feature (10)..(10): n is a, c, g, or t
  misc_feature (86)..(86): n is a, c, g, or t
  misc_feature (99)..(99): n is a, c, g, or t
  misc_feature (104)..(104): n is a, c, g, or t
  misc_feature (106)..(106): n is a, c, g, or t
  misc_feature (118)..(118): n is a, c, g, or t
  misc_feature (124)..(124): n is a, c, g, or t
  misc_feature (134)..(134): n is a, c, g, or t
  misc_feature (143)..(143): n is a, c, g, or t
  misc_feature (145)..(145): n is a, c, g, or t
  misc_feature (148)..(148): n is a, c, g, or t
  misc_feature (151)..(151): n is a, c, g, or t
  misc_feature (154)..(154): n is a, c, g, or t
  misc_feature (159)..(159): n is a, c, g, or t
  misc_feature (161)..(162): n is a, c, g, or t
  misc_feature (165)..(165): n is a, c, g, or t
  misc_feature (190)..(190): n is a, c, g, or t
  misc_feature (192)..(192): n is a, c, g, or t
  misc_feature (197)..(197): n is a, c, g, or t
  misc_feature (208)..(208): n is a, c, g, or t
  misc_feature (214)..(214): n is a, c, g, or t
  misc_feature (220)..(220): n is a, c, g, or t
  misc_feature (225)..(225): n is a, c, g, or t
  misc_feature (228)..(228): n is a, c, g, or t
  misc_feature (232)..(232): n is a, c, g, or t
  misc_feature (234)..(234): n is a, c, g, or t
  misc_feature (236)..(236): n is a, c, g, or t
  misc_feature (240)..(240): n is a, c, g, or t
  misc_feature (242)..(242): n is a, c, g, or t
  misc_feature (245)..(245): n is a, c, g, or t
  misc_feature (249)..(249): n is a, c, g, or t
  misc_feature (293)..(293): n is a, c, g, or t
  misc_feature (302)..(302): n is a, c, g, or t
  misc_feature (308)..(308): n is a, c, g, or t
  misc_feature (319)..(319): n is a, c, g, or t
  misc_feature (323)..(323): n is a, c, g, or t
  misc_feature (334)..(334): n is a, c, g, or t
  misc_feature (337)..(338): n is a, c, g, or t
  misc_feature (342)..(342): n is a, c, g, or t
  misc_feature (344)..(344): n is a, c, g, or t
  misc_feature (347)..(347): n is a, c, g, or t
  misc_feature (351)..(351): n is a, c, g, or t
  misc_feature (356)..(356): n is a, c, g, or t
  misc_feature (376)..(376): n is a, c, g, or t
  misc_feature (393)..(393): n is a, c, g, or t
  misc_feature (410)..(410): n is a, c, g, or t
  misc_feature (414)..(414): n is a, c, g, or t
  misc_feature (417)..(417): n is a, c, g, or t
  misc_feature (423)..(423): n is a, c, g, or t
  misc_feature (426)..(426): n is a, c, g, or t
  misc_feature (434)..(434): n is a, c, g, or t
  misc_feature (437)..(438): n is a, c, g, or t
  misc_feature (441)..(442): n is a, c, g, or t
  misc_feature (453)..(453): n is a, c, g, or t
  misc_feature (455)..(456): n is a, c, g, or t
  misc_feature (460)..(460): n is a, c, g, or t
  misc_feature (478)..(478): n is a, c, g, or t
  misc_feature (487)..(487): n is a, c, g, or t
  misc_feature (489)..(489): n is a, c, g, or t
  misc_feature (496)..(496): n is a, c, g, or t
  misc_feature (498)..(498): n is a, c, g, or t
  misc_feature (506)..(506): n is a, c, g, or t
  misc_feature (510)..(510): n is a, c, g, or t
  misc_feature (518)..(518): n is a, c, g, or t
  misc_feature (527)..(527): n is a, c, g, or t
  misc_feature (534)..(534): n is a, c, g, or t
  misc_feature (545)..(545): n is a, c, g, or t
  misc_feature (556)..(557): n is a, c, g, or t
  misc_feature (587)..(587): n is a, c, g, or t
  misc_feature (593)..(593): n is a, c, g, or t
  misc_feature (599)..(599): n is a, c, g, or t
  misc_feature (624)..(625): n is a, c, g, or t
  misc_feature (637)..(637): n is a, c, g, or t
  misc_feature (651)..(651): n is a, c, g, or t
  misc_feature (654)..(654): n is a, c, g, or t
  misc_feature (663)..(663): n is a, c, g, or t
  misc_feature (672)..(672): n is a, c, g, or t
  misc_feature (677)..(677): n is a, c, g, or t
  misc_feature (686)..(687): n is a, c, g, or t
  misc_feature (695)..(695): n is a, c, g, or t
  misc_feature (709)..(709): n is a, c, g, or t
  nbla-12204-r1
ggnnngnttngggccttttttttttttttttccttttttttttttttttttttttttttttttttttttttttttttttttttttnggcagggggggtnggaananccaatgtttttntttaanaaagtcctgnttaacagcntnttntancanaaaangnnggntttttaaaacgggcttgaacttttncncaatntgttttgaacnctggcntgcccncctgngtncatntntnctgntnggngctntggttttaatttttaatttcaaaaaattttgataaaactaaaangttaaatgncccctntaatgaaatcnctgntttaactaacnccnnccananggnttgntttcnttggaaaattttttaaagcnttttgaattaaagtaanaactttgttttttaaanaacnccntttaanggncgattaanggnngcnntttgccccaangnngggnttccctaatttgcctaanggtaaaaancnctggggngnttgttaanagtnctgttttncagggcctnccccagngtttttgaatntaaatttttannggggaaagggggaatttgcctgaacccaancaattnctgtantcagggaagtttccaagctcccctnntttacggcaaangggttttgaaactngcntttaaaaanaccataggnggggngaattagtnntttgggcngttttatttttacn

SEQ ID NO: 365 - DNA, 724 bp, Homo sapiens
  misc_feature (2)..(2): n is a, c, g, or t
  nbla-12217-f
gnttgattcctttgcactgttggcctactggattgtgggatgatcatgggaacgattcttccttaagccgaagtcaaagggaaatccaccctcacgctgcatgtagttttcggtcatttacacaaaccaacagttttatggagcgccttctacacgctcagagatagggatacgtaagataaatggcccagggtctggagaactagacgaataagcagtttcagcacaatatgataaaccccacctaagaggcagggaaacccctcaaaattagtttccttattccccctatcttattcctcctatctatatctttcttagggttgaaaatcctaattaaaaagtagtaactcgcgggagatttcattgctaaacatttgtcaaccactttcttgtttgaataagtgacttccccaaattagcaaagacgactctgaaaatagaatgctgcataggcaagattggatgagagagagaagatcttggagacaggacaggtaactggagatcgttcctgggcaagtgtgtatggagaagtgtccgtaccctcaatcagtaaatcttagtgtaatgtcatcagaatgagcatcaaagagagccttaagggacccgagaataaactaggattctcaaaccaaacatggcccacagacagcttggtggacaggcatgtttttcttttgctgcactctagcctgggcgacagtgcgaggctcttgtctca

SEQ ID NO: 366 - DNA, 869 bp, Homo sapiens
  misc_feature (2)..(2): n is a, c, g, or t
  misc_feature (6)..(6): n is a, c, g, or t
  misc_feature (54)..(54): n is a, c, g, or t
  misc_feature (61)..(61): n is a, c, g, or t
  misc_feature (78)..(79): n is a, c, g, or t
  misc_feature (82)..(82): n is a, c, g, or t
  misc_feature (86)..(86): n is a, c, g, or t
  misc_feature (88)..(88): n is a, c, g, or t
  misc_feature (91)..(91): n is a, c, g, or t
  misc_feature (93)..(94): n is a, c, g, or t
  misc_feature (96)..(96): n is a, c, g, or t
  misc_feature (99)..(100): n is a, c, g, or t
  misc_feature (103)..(103): n is a, c, g, or t
  misc_feature (106)..(107): n is a, c, g, or t
  misc_feature (111)..(112): n is a, c, g, or t
  misc_feature (114)..(114): n is a, c, g, or t
  misc_feature (116)..(116): n is a, c, g, or t
  misc_feature (125)..(125): n is a, c, g, or t
  misc_feature (128)..(128): n is a, c, g, or t
  misc_feature (130)..(131): n is a, c, g, or t
  misc_feature (139)..(139): n is a, c, g, or t
  misc_feature (142)..(142): n is a, c, g, or t
  misc_feature (146)..(146): n is a, c, g, or t
  misc_feature (148)..(148): n is a, c, g, or t
  misc_feature (151)..(152): n is a, c, g, or t
  misc_feature (154)..(156): n is a, c, g, or t
  misc_feature (159)..(159): n is a, c, g, or t
  misc_feature (162)..(163): n is a, c, g, or t
  misc_feature (165)..(165): n is a, c, g, or t
  misc_feature (170)..(170): n is a, c, g, or t
  misc_feature (175)..(175): n is a, c, g, or t
  misc_feature (180)..(180): n is a, c, g, or t
  misc_feature (182)..(182): n is a, c, g, or t
  misc_feature (184)..(184): n is a, c, g, or t
  misc_feature (187)..(187): n is a, c, g, or t
  misc_feature (190)..(190): n is a, c, g, or t
  misc_feature (192)..(192): n is a, c, g, or t
  misc_feature (195)..(196): n is a, c, g, or t
  misc_feature (198)..(198): n is a, c, g, or t
  misc_feature (202)..(202): n is a, c, g, or t
  misc_feature (204)..(204): n is a, c, g, or t
  misc_feature (206)..(206): n is a, c, g, or t
  misc_feature (209)..(211): n is a, c, g, or t
  misc_feature (221)..(221): n is a, c, g, or t
  misc_feature (231)..(231): n is a, c, g, or t
  misc_feature (237)..(237): n is a, c, g, or t
  misc_feature (241)..(241): n is a, c, g, or t
  misc_feature (251)..(253): n is a, c, g, or t
  misc_feature (257)..(257): n is a, c, g, or t
  misc_feature (260)..(260): n is a, c, g, or t
  misc_feature (262)..(262): n is a, c, g, or t
  misc_feature (267)..(267): n is a, c, g, or t
  misc_feature (270)..(270): n is a, c, g, or t
  misc_feature (273)..(274): n is a, c, g, or t
  misc_feature (278)..(282): n is a, c, g, or t
  misc_feature (294)..(294): n is a, c, g, or t
  misc_feature (297)..(297): n is a, c, g, or t
  misc_feature (300)..(300): n is a, c, g, or t
  misc_feature (312)..(312): n is a, c, g, or t
  misc_feature (314)..(316): n is a, c, g, or t
  misc_feature (319)..(319): n is a, c, g, or t
  misc_feature (324)..(324): n is a, c, g, or t
  misc_feature (326)..(326): n is a, c, g, or t
  misc_feature (330)..(331): n is a, c, g, or t
  misc_feature (336)..(338): n is a, c, g, or t
  misc_feature (352)..(353): n is a, c, g, or t
  misc_feature (359)..(360): n is a, c, g, or t
  misc_feature (364)..(364): n is a, c, g, or t
  misc_feature (367)..(369): n is a, c, g, or t
  misc_feature (378)..(379): n is a, c, g, or t
  misc_feature (388)..(389): n is a, c, g, or t
  misc_feature (394)..(394): n is a, c, g, or t
  misc_feature (396)..(397): n is a, c, g, or t
  misc_feature (404)..(404): n is a, c, g, or t
  misc_feature (422)..(422): n is a, c, g, or t
  misc_feature (434)..(434): n is a, c, g, or t
  misc_feature (436)..(436): n is a, c, g, or t
  misc_feature (439)..(439): n is a, c, g, or t
  misc_feature (448)..(448): n is a, c, g, or t
  misc_feature (458)..(458): n is a, c, g, or t
  misc_feature (466)..(467): n is a, c, g, or t
  misc_feature (471)..(471): n is a, c, g, or t
  misc_feature (473)..(474): n is a, c, g, or t
  misc_feature (480)..(482): n is a, c, g, or t
  misc_feature (491)..(491): n is a, c, g, or t
  misc_feature (495)..(495): n is a, c, g, or t
  misc_feature (499)..(499): n is a, c, g, or t
  misc_feature (504)..(504): n is a, c, g, or t
  misc_feature (511)..(511): n is a, c, g, or t
  misc_feature (515)..(515): n is a, c, g, or t
  misc_feature (523)..(523): n is a, c, g, or t
  misc_feature (532)..(532): n is a, c, g, or t
  misc_feature (534)..(534): n is a, c, g, or t
  misc_feature (545)..(545): n is a, c, g, or t
  misc_feature (547)..(547): n is a, c, g, or t
  misc_feature (556)..(556): n is a, c, g, or t
  misc_feature (571)..(571): n is a, c, g, or t
  misc_feature (578)..(578): n is a, c, g, or t
  misc_feature (582)..(582): n is a, c, g, or t
  misc_feature (587)..(587): n is a, c, g, or t
  misc_feature (590)..(590): n is a, c, g, or t
  misc_feature (597)..(597): n is a, c, g, or t
  misc_feature (604)..(604): n is a, c, g, or t
  misc_feature (617)..(617): n is a, c, g, or t
  misc_feature (619)..(619): n is a, c, g, or t
  misc_feature (622)..(622): n is a, c, g, or t
  misc_feature (626)..(626): n is a, c, g, or t
  misc_feature (628)..(628): n is a, c, g, or t
  misc_feature (632)..(634): n is a, c, g, or t
  misc_feature (644)..(644): n is a, c, g, or t
  misc_feature (647)..(647): n is a, c, g, or t
  misc_feature (649)..(649): n is a, c, g, or t
  misc_feature (653)..(655): n is a, c, g, or t
  misc_feature (657)..(657): n is a, c, g, or t
  misc_feature (661)..(661): n is a, c, g, or t
  misc_feature (670)..(670): n is a, c, g, or t
  misc_feature (681)..(681): n is a, c, g, or t
  misc_feature (686)..(687): n is a, c, g, or t
  misc_feature (689)..(689): n is a, c, g, or t
  misc_feature (692)..(692): n is a, c, g, or t
  misc_feature (699)..(700): n is a, c, g, or t
  misc_feature (702)..(702): n is a, c, g, or t
  misc_feature (717)..(720): n is a, c, g, or t
  misc_feature (723)..(726): n is a, c, g, or t
  misc_feature (728)..(728): n is a, c, g, or t
  misc_feature (732)..(732): n is a, c, g, or t
  misc_feature (737)..(737): n is a, c, g, or t
  misc_feature (746)..(746): n is a, c, g, or t
  misc_feature (748)..(748): n is a, c, g, or t
  misc_feature (753)..(753): n is a, c, g, or t
  misc_feature (759)..(759): n is a, c, g, or t
  misc_feature (765)..(765): n is a, c, g, or t
  misc_feature (769)..(769): n is a, c, g, or t
  misc_feature (774)..(774): n is a, c, g, or t
  misc_feature (776)..(776): n is a, c, g, or t
  misc_feature (783)..(783): n is a, c, g, or t
  misc_feature (787)..(787): n is a, c, g, or t
  misc_feature (798)..(798): n is a, c, g, or t
  misc_feature (802)..(802): n is a, c, g, or t
  misc_feature (812)..(812): n is a, c, g, or t
  misc_feature (821)..(821): n is a, c, g, or t
  misc_feature (833)..(833): n is a, c, g, or t
  misc_feature (836)..(836): n is a, c, g, or t
  misc_feature (839)..(839): n is a, c, g, or t
  misc_feature (845)..(845): n is a, c, g, or t
  misc_feature (847)..(847): n is a, c, g, or t
  misc_feature (851)..(851): n is a, c, g, or t
  misc_feature (853)..(853): n is a, c, g, or t
  misc_feature (866)..(866): n is a, c, g, or t
  nbla-12217-r1
gnattngtggccttttttttttttcttttttttttttttttttttttttttttnttttttnttttttttttttttttnnttntttntnttncnnanggnncanttnntttnntnanaaggggggnttngnnaaggagcnctnactncnaanncnnnaanacnngnggggnggggnttttncntnttnaananggnngncccncncnctnnnacctaacccnaaatggcctngggggncccncccccctttnnngagntgnanggggnggntgnnaacnnnnngggggaaagacnggnacngggcaggggggntnnnttnactgnanacannagcannngactaagaatgacnnaagacnnaacnacnnnccaaggctnnaaaggggtnngtaananngaaaacnaggggcaagggggcatanggggtgaggaantnaanctttaggancggggggacnaaaaacannggangnntgaacnnncttgacatngtgntacncttangaacgangganacccctgnaactcactngncactttatatncntctcccccnggggggggaatcctnaaaaaancgcnttttnttnaccccgngaaatanaaacacccccccntnttngaangnggannnttcacagggnggngntttnnncntatnggccccaanagtttcctttncttannanaanacaaaanncntttttcaaggccccnnnnttnnnncnccgnggggnctttttaangncccanaaggcnaagggncatntgccntnctatcangggngggggggggcntttnccataataancgccacccnaggggggggggncanaanccaccncnaggngnggggggggcttcnaca

SEQ ID NO: 367 - RNA, 27 nt, Artificial Sequence
  synthetic oligonucleotide
agcaucgagucggccuuggccuacugg

SEQ ID NO: 368 - DNA, 42 bp, Artificial Sequence
  Primer
gcggctgaagacggcctatgtggccttttttttttttttttt

SEQ ID NO: 369 - DNA, 21 bp, Artificial Sequence
  Primer
agcatcgagtcggccttgttg

SEQ ID NO: 370 - DNA, 20 bp, Artificial Sequence
  Primer
gcgctgaagacggcctatgt

SEQ ID NO: 371 - DNA, 19 bp, Artificial Sequence
  Primer
tcagaaggcttcgagactg

SEQ ID NO: 372 - DNA, 20 bp, Artificial Sequence
  Primer
gcagatatcttgtcaaaggt

SEQ ID NO: 373 - DNA, 20 bp, Artificial Sequence
  Primer
ggtgagccctaacatccaca

SEQ ID NO: 374 - DNA, 19 bp, Artificial Sequence
  Primer
agcccgtaagccatcaatc

SEQ ID NO: 375 - DNA, 20 bp, Artificial Sequence
  Primer
atcatggtgaaaggcacgtc

SEQ ID NO: 376 - DNA, 20 bp, Artificial Sequence
  Primer
cataatttccacgtgttgtg

SEQ ID NO: 377 - DNA, 20 bp, Artificial Sequence
  Primer
agaggttagccctgagacag

SEQ ID NO: 378 - DNA, 20 bp, Artificial Sequence
  Primer
tctatgcttccagcaggtac

SEQ ID NO: 379 - DNA, 20 bp, Artificial Sequence
  Primer
cctttatattagaacgtggc

SEQ ID NO: 380 - DNA, 18 bp, Artificial Sequence
  Primer
taggttttcaggacttgg

SEQ ID NO: 381 - DNA, 20 bp, Artificial Sequence
  Primer
gcaggatagcaaccttgaca

SEQ ID NO: 382 - DNA, 20 bp, Artificial Sequence
  Primer
atgcatgctttcgtgtgttc

SEQ ID NO: 383 - DNA, 22 bp, Artificial Sequence
  Primer
caccctggagaaacacaaactc

SEQ ID NO: 384 - DNA, 20 bp, Artificial Sequence
  Primer
atgccgtccatcttcatcac

SEQ ID NO: 385 - DNA, 20 bp, Artificial Sequence
  Primer
aacatgaatctgtgggtgac

SEQ ID NO: 386 - DNA, 20 bp, Artificial Sequence
  Primer
tcaatcgcttgaccttcctc

SEQ ID NO: 387 - DNA, 20 bp, Artificial Sequence
  Primer
aagcattgaagtaacaaccg

SEQ ID NO: 388 - DNA, 20 bp, Artificial Sequence
  Primer
tgcatttgacatatgagagc

SEQ ID NO: 389 - DNA, 20 bp, Artificial Sequence
  Primer
tattagaacgtggccctcca

SEQ ID NO: 390 - DNA, 20 bp, Artificial Sequence
  Primer
tcgggactagcaggacagaa

SEQ ID NO: 391 - DNA, 20 bp, Artificial Sequence
  Primer
taaaccagcaaccctaacag

SEQ ID NO: 392 - DNA, 20 bp, Artificial Sequence
  Primer
actagaatcagacctgcctt

SEQ ID NO: 393 - DNA, 20 bp, Artificial Sequence
  Primer
aactggcagcaaagaaggtc

SEQ ID NO: 394 - DNA, 21 bp, Artificial Sequence
  Primer
agcagaagcacgtcagtaagg

SEQ ID NO: 395 - DNA, 20 bp, Artificial Sequence
  Primer
tcacccagaatgagacatgg

SEQ ID NO: 396 - DNA, 20 bp, Artificial Sequence
  Primer
gtcagaaggtgacacggtga

SEQ ID NO: 397 - DNA, 20 bp, Artificial Sequence
  Primer
cccaaggaggtaagagcctg

SEQ ID NO: 398 - DNA, 20 bp, Artificial Sequence
  Primer
aagcgctggagcttgtcggt

SEQ ID NO: 399 - DNA, 20 bp, Artificial Sequence
  Primer
agaacggtgtaattcagaga

SEQ ID NO: 400 - DNA, 20 bp, Artificial Sequence
  Primer
gtcatcagcaagctcgaata

SEQ ID NO: 401 - DNA, 20 bp, Artificial Sequence
  Primer
tttatattagaacgtggccc

SEQ ID NO: 402 - DNA, 20 bp, Artificial Sequence
  Primer
aggacttggtagcttctcgg

SEQ ID NO: 403 - DNA, 26 bp, Artificial Sequence
  Primer
aattttaaaaaggcaggatatacaac

SEQ ID NO: 404 - DNA, 24 bp, Artificial Sequence
  Primer
aaggagaggtagcattttatgtgc

SEQ ID NO: 405 - DNA, 20 bp, Artificial Sequence
  Primer
ggcatcctcatctcctcaga

SEQ ID NO: 406 - DNA, 20 bp, Artificial Sequence
  Primer
tctgaagcagttcgaagcac

SEQ ID NO: 407 - DNA, 21 bp, Artificial Sequence
  Primer
tggttcaaactcttccctcct

SEQ ID NO: 408 - DNA, 20 bp, Artificial Sequence
  Primer
cttccacctgtgcgttttct

SEQ ID NO: 409 - DNA, 19 bp, Artificial Sequence
  Primer
tgggaaatccacctgcatc

SEQ ID NO: 410 - DNA, 20 bp, Artificial Sequence
  Primer
accagctcaccctgaatgtg

SEQ ID NO: 411 - DNA, 21 bp, Artificial Sequence
  Primer
cgtggcaacacctttttattc

SEQ ID NO: 412 - DNA, 18 bp, Artificial Sequence
  Primer
acacggcatgggtttgtt

SEQ ID NO: 413 - DNA, 21 bp, Artificial Sequence
  Primer
tgaggagttgaatgctgacct

SEQ ID NO: 414 - DNA, 20 bp, Artificial Sequence
  Primer
catcggggttaatgctcttg

SEQ ID NO: 415 - DNA, 21 bp, Artificial Sequence
  Primer
acttgctcatggtgctgtctc

SEQ ID NO: 416 - DNA, 20 bp, Artificial Sequence
  Primer
cgcagagcctggtaatcttc

SEQ ID NO: 417 - DNA, 20 bp, Artificial Sequence
  Primer
cctcaagaaccagaccaagc

SEQ ID NO: 418 - DNA, 20 bp, Artificial Sequence
  Primer
ctgatgctgaggagctgaca

SEQ ID NO: 419 - DNA, 19 bp, Artificial Sequence
  Primer
ggccaccagagaggtaatg

SEQ ID NO: 420 - DNA, 21 bp, Artificial Sequence
  Primer
gtgctgacctaagacccaaag

SEQ ID NO: 421 - DNA, 20 bp, Artificial Sequence
  Primer
ctgcctttgagatggtgatg

SEQ ID NO: 422 - DNA, 21 bp, Artificial Sequence
  Primer
tgtagtgctttgcattgttgg

SEQ ID NO: 423 - DNA, 19 bp, Artificial Sequence
  Primer
tacctcttcggctggatgg

SEQ ID NO: 424 - DNA, 18 bp, Artificial Sequence
  Primer
gcttgggcaggatgaatg

SEQ ID NO: 425 - DNA, 20 bp, Artificial Sequence
  Primer
agccgatgaagtgtctgctt

SEQ ID NO: 426 - DNA, 21 bp, Artificial Sequence
  Primer
ragccacaaaagcaggttagg

SEQ ID NO: 427 - DNA, 22 bp, Artificial Sequence
  Primer
gcagcagatatagggacacaga

SEQ ID NO: 428 - DNA, 20 bp, Artificial Sequence
  Primer
cacgcataaatggctacacc

SEQ ID NO: 429 - DNA, 19 bp, Artificial Sequence
  Primer
agattattcacctgtaagc

SEQ ID NO: 430 - DNA, 20 bp, Artificial Sequence
  Primer
ttttccacatgtccagcacc

SEQ ID NO: 431 - DNA, 20 bp, Artificial Sequence
  Primer
gtgaccagcaaggaaacaca

SEQ ID NO: 432 - DNA, 19 bp, Artificial Sequence
  Primer
gaggattcagccacgaaca

SEQ ID NO: 433 - DNA, 20 bp, Artificial Sequence
  Primer
gcatggaggaaaccattagg

SEQ ID NO: 434 - DNA, 20 bp, Artificial Sequence
  Primer
tggctcttcaaccaaacctt

SEQ ID NO: 435 - DNA, 20 bp, Artificial Sequence
  Primer
atgacctggcactaggcttg

SEQ ID NO: 436 - DNA, 20 bp, Artificial Sequence
  Primer
aacacatctgctggcttctg

SEQ ID NO: 437 - DNA, 20 bp, Artificial Sequence
  Primer
acgacgacactgacaaccac

SEQ ID NO: 438 - DNA, 20 bp, Artificial Sequence
  Primer
gcttgacctccgactcatct

SEQ ID NO: 439 - DNA, 20 bp, Artificial Sequence
  Primer
cacccatctgtgtctgtggt

SEQ ID NO: 440 - DNA, 19 bp, Artificial Sequence
  Primer
cgtgctgacgatgatgttg

SEQ ID NO: 441 - DNA, 21 bp, Artificial Sequence
  Primer
gtgtttggcactacatcacca

SEQ ID NO: 442 - DNA, 19 bp, Artificial Sequence
  Primer
ccgggttttccattttcac

SEQ ID NO: 443 - DNA, 20 bp, Artificial Sequence
  Primer
tacagtgggaactgcgtttg

SEQ ID NO: 444 - DNA, 19 bp, Artificial Sequence
  Primer
cagggttcgtatgcaggag

SEQ ID NO: 445 - DNA, 20 bp, Artificial Sequence
  Primer
agccattacaggtggcaaga

SEQ ID NO: 446 - DNA, 23 bp, Artificial Sequence
  Primer
gttgggtcgatcttaggaggtag

SEQ ID NO: 447 - DNA, 19 bp, Artificial Sequence
  Primer
taacaactctagcaccatc

SEQ ID NO: 448 - DNA, 20 bp, Artificial Sequence
  Primer
tacttagcagaacagaagag

SEQ ID NO: 449 - DNA, 20 bp, Artificial Sequence
  Primer
gtggacaccaagaatgcaag

SEQ ID NO: 450 - DNA, 21 bp, Artificial Sequence
  Primer
cagccaactgtggtaagaagg

SEQ ID NO: 451 - DNA, 20 bp, Artificial Sequence
  Primer
cagtgcagccttggaagtgt

SEQ ID NO: 452 - DNA, 20 bp, Artificial Sequence
  Primer
tcaaaagctgcgtgtgtctc

SEQ ID NO: 453 - DNA, 20 bp, Artificial Sequence
  Primer
ttagtgagtacacgagctgg

SEQ ID NO: 454 - DNA, 20 bp, Artificial Sequence
  Primer
acttaacccagactgaccac

SEQ ID NO: 455 - DNA, 19 bp, Artificial Sequence
  Primer
agatgtttaagggcaaacc

SEQ ID NO: 456 - DNA, 18 bp, Artificial Sequence
  Primer
tggagcctcttggatctc

SEQ ID NO: 457 - DNA, 19 bp, Artificial Sequence
  Primer
aacatcctggtggaacagc

SEQ ID NO: 458 - DNA, 20 bp, Artificial Sequence
  Primer
ctctatagtaacgaccaaac

SEQ ID NO: 459 - DNA, 21 bp, Artificial Sequence
  Primer
gcttgaggacagtgaaaacca

SEQ ID NO: 460 - DNA, 20 bp, Artificial Sequence
  Primer
tggagtgagaggatgggaag

SEQ ID NO: 461 - DNA, 21 bp, Artificial Sequence
  Primer
gcaggggacacaggactctac

SEQ ID NO: 462 - DNA, 20 bp, Artificial Sequence
  Primer
aagctccttctggctcaaca

SEQ ID NO: 463 - DNA, 20 bp, Artificial Sequence
  Primer
ccgagatcttctgccttcat

SEQ ID NO: 464 - DNA, 20 bp, Artificial Sequence
  Primer
tccttgccgtctcaaactct

SEQ ID NO: 465 - DNA, 19 bp, Artificial Sequence
  Primer
atctctctagtgccatgac

SEQ ID NO: 466 - DNA, 20 bp, Artificial Sequence
  Primer
agtcttgctaagactttcag

SEQ ID NO: 467 - DNA, 21 bp, Artificial Sequence
  Primer
cagtgcggttgtggtctatct

SEQ ID NO: 468 - DNA, 19 bp, Artificial Sequence
  Primer
tgaggcgttgactttctgg

SEQ ID NO: 469 - DNA, 20 bp, Artificial Sequence
  Primer
ttcagcaggtcctagccaag

SEQ ID NO: 470 - DNA, 21 bp, Artificial Sequence
  Primer
rtggaagctgctgaagaaaca

SEQ ID NO: 471 - DNA, 20 bp, Artificial Sequence
  Primer
gcctttctttgtctggaacg

SEQ ID NO: 472 - DNA, 20 bp, Artificial Sequence
  Primer
gggtgaagcaatttcacagg

SEQ ID NO: 473 - DNA, 20 bp, Artificial Sequence
  Primer
aaatggcagtttgactgtgg

SEQ ID NO: 474 - DNA, 20 bp, Artificial Sequence
  Primer
ttggctgagttctccctcat

SEQ ID NO: 475 - DNA, 20 bp, Artificial Sequence
  Primer
attaatcctgcactcttacg

SEQ ID NO: 476 - DNA, 20 bp, Artificial Sequence
  Primer
agttccatttctacagcaag

SEQ ID NO: 477 - DNA, 20 bp, Artificial Sequence
  Primer
ttggtcgtgaggtggattct

SEQ ID NO: 478 - DNA, 20 bp, Artificial Sequence
  Primer
atcttgccagccacagactt

SEQ ID NO: 479 - DNA, 20 bp, Artificial Sequence
  Primer
agagtcacctgcgaccctta

SEQ ID NO: 480 - DNA, 20 bp, Artificial Sequence
  Primer
agctctagcagccagcacat

SEQ ID NO: 481 - DNA, 22 bp, Artificial Sequence
  Primer
cataatcttctccggcttcatc

SEQ ID NO: 482 - DNA, 22 bp, Artificial Sequence
  Primer
gtctggtatttccgtgaggttt

SEQ ID NO: 483 - DNA, 20 bp, Artificial Sequence
  Primer
atctcccatcgactcactgc

SEQ ID NO: 484 - DNA, 20 bp, Artificial Sequence
  Primer
tggctttactggtcatacag

SEQ ID NO: 485 - DNA, 19 bp, Artificial Sequence
  Primer
tgattctccaaggcaaggt

SEQ ID NO: 486 - DNA, 19 bp, Artificial Sequence
  Primer
gatttccccattgactgct

SEQ ID NO: 487 - DNA, 20 bp, Artificial Sequence
  Primer
agcctttgctaccctcttcc

SEQ ID NO: 488 - DNA, 19 bp, Artificial Sequence
  Primer
ggcgaaacactcctctcgt

SEQ ID NO: 489 - DNA, 20 bp, Artificial Sequence
  Primer
aacctcgtaaaaaccatggc

SEQ ID NO: 490 - DNA, 20 bp, Artificial Sequence
  Primer
agcagtgacttgagcatttg

SEQ ID NO: 491 - DNA, 20 bp, Artificial Sequence
  Primer
cgacacctctcattgcacac

SEQ ID NO: 492 - DNA, 20 bp, Artificial Sequence
  Primer
tccgtctcaaatccacacac

SEQ ID NO: 493 - DNA, 19 bp, Artificial Sequence
  Primer
agcacaattccccagacac

SEQ ID NO: 494 - DNA, 22 bp, Artificial Sequence
  Primer
ctgtagcccttactgtttgacc

SEQ ID NO: 495 - DNA, 20 bp, Artificial Sequence
  Primer
ctgtgttctgatgccaatgc

SEQ ID NO: 496 - DNA, 20 bp, Artificial Sequence
  Primer
tgcaactttctccaccaaga

SEQ ID NO: 497 - DNA, 20 bp, Artificial Sequence
  Primer
ggagctagccaagatgatcg

SEQ ID NO: 498 - DNA, 20 bp, Artificial Sequence
  Primer
ctggccatcctagaggagaa

SEQ ID NO: 499 - DNA, 26 bp, Artificial Sequence
  Primer
aattttaaaaaggcaggatatacaac

SEQ ID NO: 500 - DNA, 24 bp, Artificial Sequence
  Primer
aaggagaggtagcattttatgtgc

SEQ ID NO: 501 - DNA, 20 bp, Artificial Sequence
  Primer
aatcttcctcccaacccatg

SEQ ID NO: 502 - DNA, 20 bp, Artificial Sequence
  Primer
tgaccctgctgaaggaagcg

SEQ ID NO: 503 - DNA, 20 bp, Artificial Sequence
  Primer
ccctgaatgttgaacgagtg

SEQ ID NO: 504 - DNA, 20 bp, Artificial Sequence
  Primer
tgcacattgaagaggcaaac

SEQ ID NO: 505 - DNA, 20 bp, Artificial Sequence
  Primer
ccgaggtcaacatttgttcc

SEQ ID NO: 506 - DNA, 20 bp, Artificial Sequence
  Primer
gagcagagcacagacagtgg

SEQ ID NO: 507 - DNA, 20 bp, Artificial Sequence
  Primer
ctggaatcatccaggctttg

SEQ ID NO: 508 - DNA, 20 bp, Artificial Sequence
  Primer
gcgtccaggataacagcact

SEQ ID NO: 509 - DNA, 20 bp, Artificial Sequence
  Primer
gtcttcaagcagcgacagtg

SEQ ID NO: 510 - DNA, 20 bp, Artificial Sequence
  Primer
ccttcagggtctggttgatg

SEQ ID NO: 511 - DNA, 20 bp, Artificial Sequence
  Primer
gggaccactaaccagctgaa

SEQ ID NO: 512 - DNA, 20 bp, Artificial Sequence
  Primer
aaatgtctgacccctcctca

SEQ ID NO: 513 - DNA, 20 bp, Artificial Sequence
  Primer
ccaggatggagtagccaaga

SEQ ID NO: 514 - DNA, 20 bp, Artificial Sequence
  Primer
gccagtgatctccaggtttg

SEQ ID NO: 515 - DNA, 20 bp, Artificial Sequence
  Primer
actggggaggaatggctagt

SEQ ID NO: 516 - DNA, 20 bp, Artificial Sequence
  Primer
ctggctggaggaaaaaggac

SEQ ID NO: 517 - DNA, 20 bp, Artificial Sequence
  Primer
ctgaggtgctgatgatcctg

SEQ ID NO: 518 - DNA, 20 bp, Artificial Sequence
  Primer
ccaaactcctgctcttctcg

SEQ ID NO: 519 - DNA, 20 bp, Artificial Sequence
  Primer
agcagtttggtgctgttggt

SEQ ID NO: 520 - DNA, 20 bp, Artificial Sequence
  Primer
gcttgttccatggttggact

SEQ ID NO: 521 - DNA, 20 bp, Artificial Sequence
  Primer
acgaggaccacaggactcaa

SEQ ID NO: 522 - DNA, 20 bp, Artificial Sequence
  Primer
tgggctccatagtttgttcc

SEQ ID NO: 523 - DNA, 20 bp, Artificial Sequence
  Primer
attctctctggaggcgatga

SEQ ID NO: 524 - DNA, 20 bp, Artificial Sequence
  Primer
tttcctcacagctccctctc

SEQ ID NO: 525 - DNA, 24 bp, Artificial Sequence
  Primer
tttagctgtttgcaaataagatgt

SEQ ID NO: 526 - DNA, 20 bp, Artificial Sequence
  Primer
aatgcagtgtgtgggatgtg

SEQ ID NO: 527 - DNA, 20 bp, Artificial Sequence
  Primer
tccgacatgatggttctcct

SEQ ID NO: 528 - DNA, 20 bp, Artificial Sequence
  Primer
agatccaggagtcacccaaa

SEQ ID NO: 529 - DNA, 20 bp, Artificial Sequence
  Primer
cacaggtgtcaaagcacgtt

SEQ ID NO: 530 - DNA, 20 bp, Artificial Sequence
  Primer
tgtagcactcgctgttgctc

SEQ ID NO: 531 - DNA, 20 bp, Artificial Sequence
  Primer
tcctgaagccttcttgccta

SEQ ID NO: 532 - DNA, 20 bp, Artificial Sequence
  Primer
gcttgtggcaaccagaaagt

SEQ ID NO: 533 - DNA, 20 bp, Artificial Sequence
  Primer
aggtgggagtcgacctttct

SEQ ID NO: 534 - DNA, 20 bp, Artificial Sequence
  Primer
gcatccttcaacttggtcct

SEQ ID NO: 535 - DNA, 20 bp, Artificial Sequence
  Primer
gcagcaaggaagaggacaag

SEQ ID NO: 536 - DNA, 20 bp, Artificial Sequence
  Primer
agcaatcttcgtctgggaag

SEQ ID NO: 537 - DNA, 20 bp, Artificial Sequence
  Primer
agaaggacctcctcccaaag

SEQ ID NO: 538 - DNA, 20 bp, Artificial Sequence
  Primer
tgcaacagtcctcttccttg

SEQ ID NO: 539 - DNA, 20 bp, Artificial Sequence
  Primer
attagttgggacctgccttg

SEQ ID NO: 540 - DNA, 20 bp, Artificial Sequence
  Primer
gcccattttcttcagcagag

SEQ ID NO: 541 - DNA, 20 bp, Artificial Sequence
  Primer
agagcagctcagctaccaca

SEQ ID NO: 542 - DNA, 20 bp, Artificial Sequence
  Primer
gaaggcaactttggtgttgg

SEQ ID NO: 543 - DNA, 20 bp, Artificial Sequence
  Primer
aaacgggtacaggatggaga

SEQ ID NO: 544 - DNA, 20 bp, Artificial Sequence
  Primer
caactggaggtcggaggata

SEQ ID NO: 545 - DNA, 23 bp, Artificial Sequence
  Primer
tggtctgtttaacaattgacctg

SEQ ID NO: 546 - DNA, 21 bp, Artificial Sequence
  Primer
gctgcatcttccaacattctt

SEQ ID NO: 547 - DNA, 20 bp, Artificial Sequence
  Primer
ccgtgcagtttgacatgaat

SEQ ID NO: 548 - DNA, 20 bp, Artificial Sequence
  Primer
tgtggcatctcattcagcat

SEQ ID NO: 549 - DNA, 20 bp, Artificial Sequence
  Primer
caccctttgaagtgacggta

SEQ ID NO: 550 - DNA, 20 bp, Artificial Sequence
  Primer
ctgaaaaaccagcccacact

SEQ ID NO: 551 - DNA, 20 bp, Artificial Sequence
  Primer
ctctgtgggatgacacatgc

SEQ ID NO: 552 - DNA, 20 bp, Artificial Sequence
  Primer
tttggcaccttgtcattttg

SEQ ID NO: 553 - DNA, 22 bp, Artificial Sequence
  Primer
cctgcttaagagtaagcctggt

SEQ ID NO: 554 - DNA, 22 bp, Artificial Sequence
  Primer
agttctgtgggctataggatcg

SEQ ID NO: 555 - DNA, 20 bp, Artificial Sequence
  Primer
tgtgtcttccgactttctgg

SEQ ID NO: 556 - DNA, 20 bp, Artificial Sequence
  Primer
tctttccctgagtgcttggt

SEQ ID NO: 557 - DNA, 20 bp, Artificial Sequence
  Primer
agaggtggaagcacttcagg

SEQ ID NO: 558 - DNA, 20 bp, Artificial Sequence
  Primer
aaagtccttggtgctctcgt

SEQ ID NO: 559 - DNA, 20 bp, Artificial Sequence
  Primer
ctggagcctgtttgatggtt

SEQ ID NO: 560 - DNA, 20 bp, Artificial Sequence
  Primer
tgctttccttactggcaggt

SEQ ID NO: 561 - DNA, 19 bp, Artificial Sequence
  Primer
gaacatgggcactgactgg

SEQ ID NO: 562 - DNA, 20 bp, Artificial Sequence
  Primer
catcagggctaggagactcg

SEQ ID NO: 563 - DNA, 21 bp, Artificial Sequence
  Primer
cagcaatgaatcctccaatgt

SEQ ID NO: 564 - DNA, 20 bp, Artificial Sequence
  Primer
tggtggttctccctgtgatt

SEQ ID NO: 565 - DNA, 20 bp, Artificial Sequence
  Primer
agaccagtggctcgtcaaac

SEQ ID NO: 566 - DNA, 19 bp, Artificial Sequence
  Primer
ttgcagacatcaggggtgt

SEQ ID NO: 567 - DNA, 20 bp, Artificial Sequence
  Primer
tctgcaccagagaatccaca

SEQ ID NO: 568 - DNA, 20 bp, Artificial Sequence
  Primer
atagggcttttctcccgtgt

SEQ ID NO: 569 - DNA, 20 bp, Artificial Sequence
  Primer
cagaaaaacggtggaggact

SEQ ID NO: 570 - DNA, 20 bp, Artificial Sequence
  Primer
ccctgccttgttctccataa

SEQ ID NO: 571 - DNA, 20 bp, Artificial Sequence
  Primer
caagcatgcaggaagaactc

SEQ ID NO: 572 - DNA, 20 bp, Artificial Sequence
  Primer
aatgttcgtagccgatccag

SEQ ID NO: 573 - DNA, 20 bp, Artificial Sequence
  Primer
tgtgtttgctggggagtatg

SEQ ID NO: 574 - DNA, 20 bp, Artificial Sequence
  Primer
tcatttgcagccactctacg

SEQ ID NO: 575 - DNA, 20 bp, Artificial Sequence
  Primer
tggagctcagaagaggagga

SEQ ID NO: 576 - DNA, 20 bp, Artificial Sequence
  Primer
cgcaacatgaagtccatcag

SEQ ID NO: 577 - DNA, 20 bp, Artificial Sequence
  Primer
caaagtccctctccttcagc

SEQ ID NO: 578 - DNA, 20 bp, Artificial Sequence
  Primer
ccctagtggccaactctgat

SEQ ID NO: 579 - DNA, 20 bp, Artificial Sequence
  Primer
ttacccaggtggttcagcat

SEQ ID NO: 580 - DNA, 20 bp, Artificial Sequence
  Primer
tacccatcagggtgatgaca

SEQ ID NO: 581 - DNA, 20 bp, Artificial Sequence
  Primer
gccaggaagtgaggaatgag

SEQ ID NO: 582 - DNA, 20 bp, Artificial Sequence
  Primer
cccggatgacctgaatgtag

SEQ ID NO: 583 - DNA, 20 bp, Artificial Sequence
  Primer
aacacactggcgttcatctg

SEQ ID NO: 584 - DNA, 20 bp, Artificial Sequence
  Primer
gactcccacttgcgtctctg

SEQ ID NO: 585 - DNA, 20 bp, Artificial Sequence
  Primer
gacatggaaggcatgctgta

SEQ ID NO: 586 - DNA, 20 bp, Artificial Sequence
  Primer
gacagacgcttcagcgaaat

SEQ ID NO: 587 - DNA, 20 bp, Artificial Sequence
  Primer
agccttggtgctgaagatgt

SEQ ID NO: 588 - DNA, 20 bp, Artificial Sequence
  Primer
cttatgtgaccgtgcacctg

SEQ ID NO: 589 - DNA, 20 bp, Artificial Sequence
  Primer
cgcctgacaatctcaattcc

SEQ ID NO: 590 - DNA, 20 bp, Artificial Sequence
  Primer
ctcacgtgtctgcgtttgat

SEQ ID NO: 591 - DNA, 20 bp, Artificial Sequence
  Primer
aggggatccggaagtatgac

SEQ ID NO: 592 - DNA, 20 bp, Artificial Sequence
  Primer
aagccgctcatctggtagag

SEQ ID NO: 593 - DNA, 20 bp, Artificial Sequence
  Primer
tgagaaaacggtcctgaagc

SEQ ID NO: 594 - DNA, 20 bp, Artificial Sequence
  Primer
tgtcagacccttggcatctt

SEQ ID NO: 595 - DNA, 20 bp, Artificial Sequence
  Primer
tacctgagtcggacacgatg

SEQ ID NO: 596 - DNA, 20 bp, Artificial Sequence
  Primer
gagagccagacaagctttgg

SEQ ID NO: 597 - DNA, 20 bp, Artificial Sequence
  Primer
acaaggacccctgtgctaac

SEQ ID NO: 598 - DNA, 20 bp, Artificial Sequence
  Primer
tgaggacagtggcaggtgta

SEQ ID NO: 599 - DNA, 20 bp, Artificial Sequence
  Primer
tgcgaggattaactccaagg

SEQ ID NO: 600 - DNA, 20 bp, Artificial Sequence
  Primer
ggcaactttggctgaagagt

SEQ ID NO: 601 - DNA, 20 bp, Artificial Sequence
  Primer
agtccccattgggatactgc

SEQ ID NO: 602 - DNA, 20 bp, Artificial Sequence
  Primer
tgggcaataatttggaaacc

SEQ ID NO: 603 - DNA, 20 bp, Artificial Sequence
  Primer
agtccccattgggatactgc

SEQ ID NO: 604 - DNA, 20 bp, Artificial Sequence
  Primer
tgggcaataatttggaaacc

SEQ ID NO: 605 - DNA, 20 bp, Artificial Sequence
  Primer
agccacactgttagcagcaa

SEQ ID NO: 606 - DNA, 20 bp, Artificial Sequence
  Primer
cgaatgtccagaagggagag

SEQ ID NO: 607 - DNA, 20 bp, Artificial Sequence
  Primer
tgacatctgcttgtccttgg

SEQ ID NO: 608 - DNA, 20 bp, Artificial Sequence
  Primer
ggacggcagtaccaagagtg

SEQ ID NO: 609 - DNA, 20 bp, Artificial Sequence
  Primer
gagtctgccattggctttgt

SEQ ID NO: 610 - DNA, 20 bp, Artificial Sequence
  Primer
ctgcttgctctgttccactg

SEQ ID NO: 611 - DNA, 21 bp, Artificial Sequence
  Primer
agacagggtctgggctgtgtt

SEQ ID NO: 612 - DNA, 20 bp, Artificial Sequence
  Primer
tgaggccaggagttcaagac

SEQ ID NO: 613 - DNA, 20 bp, Artificial Sequence
  Primer
ctggcacaatgtcttcacaa

SEQ ID NO: 614 - DNA, 19 bp, Artificial Sequence
  Primer
ttgaaggggagattcctga

SEQ ID NO: 615 - DNA, 20 bp, Artificial Sequence
  Primer
cgacagatgaccttgattcg

SEQ ID NO: 616 - DNA, 20 bp, Artificial Sequence
  Primer
gcctcagaagcctttctcaa

SEQ ID NO: 617 - DNA, 20 bp, Artificial Sequence
  Primer
gttggcgagctagcaaaact

SEQ ID NO: 618 - DNA, 20 bp, Artificial Sequence
  Primer
tgccatccttctcacagatg

SEQ ID NO: 619 - DNA, 20 bp, Artificial Sequence
  Primer
ttacccataatgccctccac

SEQ ID NO: 620 - DNA, 20 bp, Artificial Sequence
  Primer
caaaacgacagcagcagaac

SEQ ID NO: 621 - DNA, 20 bp, Artificial Sequence
  Primer
ggcattggaggttgtcattc

SEQ ID NO: 622 - DNA, 20 bp, Artificial Sequence
  Primer
gcttgctcttcaccaggaac

SEQ ID NO: 623 - DNA, 20 bp, Artificial Sequence
  Primer
gaagaccctggtttttgcag

SEQ ID NO: 624 - DNA, 20 bp, Artificial Sequence
  Primer
cactcggttggtgaaatcag

SEQ ID NO: 625 - DNA, 20 bp, Artificial Sequence
  Primer
aggagaagcctcatcaacca

SEQ ID NO: 626 - DNA, 20 bp, Artificial Sequence
  Primer
tcaggcagacattcccagat

SEQ ID NO: 627 - DNA, 20 bp, Artificial Sequence
  Primer
aatgtgccggttttctcatc

SEQ ID NO: 628 - DNA, 20 bp, Artificial Sequence
  Primer
ccaaccccttagacatgcac

SEQ ID NO: 629 - DNA, 20 bp, Artificial Sequence
  Primer
tctgtgaaagggcatgtgag

SEQ ID NO: 630 - DNA, 20 bp, Artificial Sequence
  Primer
ggagggatttcattgctctg

SEQ ID NO: 631 - DNA, 19 bp, Artificial Sequence
  Primer
tctcagttgggttggaagc

SEQ ID NO: 632 - DNA, 20 bp, Artificial Sequence
  Primer
ggagaaaagccagagtgtcg

SEQ ID NO: 633 - DNA, 20 bp, Artificial Sequence
  Primer
cacgggaacccatttgtatg

SEQ ID NO: 634 - DNA, 20 bp, Artificial Sequence
  Primer
gtggaaggagccgttgataa

SEQ ID NO: 635 - DNA, 20 bp, Artificial Sequence
  Primer
atcggcagagtgcatacctt

SEQ ID NO: 636 - DNA, 20 bp, Artificial Sequence
  Primer
tctgtggctcaatacgcttg

SEQ ID NO: 637 - DNA, 20 bp, Artificial Sequence
  Primer
ttcccaccaaatcagtctcc

SEQ ID NO: 638 - DNA, 20 bp, Artificial Sequence
  Primer
tggccactgaagtctcaggt

SEQ ID NO: 639 - DNA, 21 bp, Artificial Sequence
  Primer
atggtgaaagtggttcagtgc

SEQ ID NO: 640 - DNA, 20 bp, Artificial Sequence
  Primer
tgcatttgctgtggattacc

SEQ ID NO: 641 - DNA, 20 bp, Artificial Sequence
  Primer
gtggcacagtgggagctatt

SEQ ID NO: 642 - DNA, 20 bp, Artificial Sequence
  Primer
gcccaatcctctaaacaacg

SEQ ID NO: 643 - DNA, 20 bp, Artificial Sequence
  Primer
gtaaacagccccttggtcag

SEQ ID NO: 644 - DNA, 20 bp, Artificial Sequence
  Primer
atgtgcagtgttccccactt

SEQ ID NO: 645 - DNA, 20 bp, Artificial Sequence
  Primer
caagcggtggagtacttgaa

SEQ ID NO: 646 - DNA, 20 bp, Artificial Sequence
  Primer
cctgcagttcccagtctttc

SEQ ID NO: 647 - DNA, 20 bp, Artificial Sequence
  Primer
cccagccagccaagtagata

SEQ ID NO: 648 - DNA, 20 bp, Artificial Sequence
  Primer
accccactctttgggtctct

SEQ ID NO: 649 - DNA, 20 bp, Artificial Sequence
  Primer
actgggcatctggatagcag

SEQ ID NO: 650 - DNA, 20 bp, Artificial Sequence
  Primer
cttcggaaccagccaactta

SEQ ID NO: 651 - DNA, 20 bp, Artificial Sequence
  Primer
tgaggggcttcaagcagtag

SEQ ID NO: 652 - DNA, 20 bp, Artificial Sequence
  Primer
gcacactcacttcccaagga

SEQ ID NO: 653 - DNA, 20 bp, Artificial Sequence
  Primer
cgtggtggtgtgtattttgg

SEQ ID NO: 654 - DNA, 20 bp, Artificial Sequence
  Primer
gcggtgacataaaaggctga

SEQ ID NO: 655 - DNA, 20 bp, Artificial Sequence
  Primer
atggagaacttgcctgcact

SEQ ID NO: 656 - DNA, 20 bp, Artificial Sequence
  Primer
tcagcttcacccacactttg

SEQ ID NO: 657 - DNA, 20 bp, Artificial Sequence
  Primer
ctgtggaggagtgggatgtt

SEQ ID NO: 658 - DNA, 20 bp, Artificial Sequence
  Primer
gttgcttttggtttcccatc

SEQ ID NO: 659 - DNA, 20 bp, Artificial Sequence
  Primer
tgtgagtcctcctgttgtgg

SEQ ID NO: 660 - DNA, 20 bp, Artificial Sequence
  Primer
gagctgtcaaaatggcttcc

SEQ ID NO: 661 - DNA, 20 bp, Artificial Sequence
  Primer
tcacagttgctgccaaagag

SEQ ID NO: 662 - DNA, 20 bp, Artificial Sequence
  Primer
cgtcccattttccagagatg

SEQ ID NO: 663 - DNA, 20 bp, Artificial Sequence
  Primer
accagtgtgaggtggtcaga

SEQ ID NO: 664 - DNA, 20 bp, Artificial Sequence
  Primer
gtgggaggccacaaacttag

SEQ ID NO: 665 - DNA, 20 bp, Artificial Sequence
  Primer
ggagcaatccaaggagatga

SEQ ID NO: 666 - DNA, 20 bp, Artificial Sequence
  Primer
tggacagcctccttcagttt

SEQ ID NO: 667 - DNA, 20 bp, Artificial Sequence
  Primer
ggtcgtttaggtggcaaatg

SEQ ID NO: 668 - DNA, 20 bp, Artificial Sequence
  Primer
cccaggaatctgcaaggata

SEQ ID NO: 669 - DNA, 20 bp, Artificial Sequence
  Primer
gttgatggagcaccacagaa

SEQ ID NO: 670 - DNA, 20 bp, Artificial Sequence
  Primer
ctgcattgttcagccaggtt

SEQ ID NO: 671 - DNA, 20 bp, Artificial Sequence
  Primer
caccaatgctgtgaacttgc

SEQ ID NO: 672 - DNA, 20 bp, Artificial Sequence
  Primer
tgacagtccagcctcacaga

SEQ ID NO: 673 - DNA, 20 bp, Artificial Sequence
  Primer
tggacacgcataagaagcag

SEQ ID NO: 674 - DNA, 20 bp, Artificial Sequence
  Primer
tgtcgaagaaactcctgacg

SEQ ID NO: 675 - DNA, 20 bp, Artificial Sequence
  Primer
gtggtgtgatgtctgccatt

SEQ ID NO: 676 - DNA, 20 bp, Artificial Sequence
  Primer
ccttgttggaccttgattcc

SEQ ID NO: 677 - DNA, 20 bp, Artificial Sequence
  Primer
aaggctctttccaggaggtc

SEQ ID NO: 678 - DNA, 21 bp, Artificial Sequence
  Primer
ccttcaggacacacaggctta

SEQ ID NO: 679 - DNA, 20 bp, Artificial Sequence
  Primer
tagtccccaaacctgctgtt

SEQ ID NO: 680 - DNA, 20 bp, Artificial Sequence
  Primer
ggcgaagaagaatttgaacg

SEQ ID NO: 681 - DNA, 20 bp, Artificial Sequence
  Primer
gcctgtggtcaaaatccagt

SEQ ID NO: 682 - DNA, 20 bp, Artificial Sequence
  Primer
ctttgcctcagtggctcttc

SEQ ID NO: 683 - DNA, 20 bp, Artificial Sequence
  Primer
tttccaggaggtcaggtttg

SEQ ID NO: 684 - DNA, 21 bp, Artificial Sequence
  Primer
ccttcaggacacacaggctta

SEQ ID NO: 685 - DNA, 20 bp, Artificial Sequence
  Primer
tgacaaagacgctgaactgg

SEQ ID NO: 686 - DNA, 20 bp, Artificial Sequence
  Primer
gggttgtcagaaagcctgag

SEQ ID NO: 687 - DNA, 20 bp, Artificial Sequence
  Primer
taatgggagtgctgcctctg

SEQ ID NO: 688 - DNA, 20 bp, Artificial Sequence
  Primer
catctttaaggctaacatgc

SEQ ID NO: 689 - DNA, 20 bp, Artificial Sequence
  Primer
aaggagcgcaccaacagtat

SEQ ID NO: 690 - DNA, 20 bp, Artificial Sequence
  Primer
atagggtggctcagggaaat

SEQ ID NO: 691 - DNA, 20 bp, Artificial Sequence
  Primer
gcacttggacctcccttgta

SEQ ID NO: 692 - DNA, 20 bp, Artificial Sequence
  Primer
ggtcctgcacatttcaacag

SEQ ID NO: 693 - DNA, 20 bp, Artificial Sequence
  Primer
gggcaggacaataagactgc

SEQ ID NO: 694 - DNA, 20 bp, Artificial Sequence
  Primer
tgtccacagcagacacccta

SEQ ID NO: 695 - DNA, 20 bp, Artificial Sequence
  Primer
aagaaggctccgagctcaat

SEQ ID NO: 696 - DNA, 20 bp, Artificial Sequence
  Primer
tctgtgagctccaggcagta

SEQ ID NO: 697 - DNA, 20 bp, Artificial Sequence
  Primer
gcagcattctgagacacagg

SEQ ID NO: 698 - DNA, 20 bp, Artificial Sequence
  Primer
gctggagagacccaaggact

SEQ ID NO: 699 - DNA, 20 bp, Artificial Sequence
  Primer
caggggataaccttcgtcaa

SEQ ID NO: 700 - DNA, 20 bp, Artificial Sequence
  Primer
aagcagcaacgtgggataac

SEQ ID NO: 701 - DNA, 20 bp, Artificial Sequence
  Primer
acattgacaaccctcccaag

SEQ ID NO: 702 - DNA, 20 bp, Artificial Sequence
  Primer
aaagcagcagcctcagagaa

SEQ ID NO: 703 - DNA, 20 bp, Artificial Sequence
  Primer
aaacgcttgagctcttccac

SEQ ID NO: 704 - DNA, 20 bp, Artificial Sequence
  Primer
agctcagcaaccgctctaaa

SEQ ID NO: 705 - DNA, 20 bp, Artificial Sequence
  Primer
agaggggccaagggatataa

SEQ ID NO: 706 - DNA, 20 bp, Artificial Sequence
  Primer
tacgagggcctgtttcagat

SEQ ID NO: 707 - DNA, 20 bp, Artificial Sequence
  Primer
ttcagagcatcgagttcacg

SEQ ID NO: 708 - DNA, 20 bp, Artificial Sequence
  Primer
tcatcctcctgggtgaagtt

SEQ ID NO: 709 - DNA, 19 bp, Artificial Sequence
  Primer
tcaccaaactggcacagag

SEQ ID NO: 710 - DNA, 20 bp, Artificial Sequence
  Primer
tcggactgtgctgcattcta

SEQ ID NO: 711 - DNA, 20 bp, Artificial Sequence
  Primer
ctgcacacctctcaatgcag

SEQ ID NO: 712 - DNA, 18 bp, Artificial Sequence
  Primer
gaagcagcccgatgtgtt

SEQ ID NO: 713 - DNA, 20 bp, Artificial Sequence
  Primer
cagagcagtaaccgtgacca

SEQ ID NO: 714 - DNA, 20 bp, Artificial Sequence
  Primer
accaggacggacactgttgt

SEQ ID NO: 715 - DNA, 19 bp, Artificial Sequence
  Primer
tacctcttcggctggatgg

SEQ ID NO: 716 - DNA, 18 bp, Artificial Sequence
  Primer
gcttgggcaggatgaatg

SEQ ID NO: 717 - DNA, 22 bp, Artificial Sequence
  Primer
gcagcagatatagggacacaga

SEQ ID NO: 718 - DNA, 20 bp, Artificial Sequence
  Primer
cacgcataaatggctacacc

SEQ ID NO: 719 - DNA, 20 bp, Artificial Sequence
  Primer
gtgaccagcaaggaaacaca

SEQ ID NO: 720 - DNA, 19 bp, Artificial Sequence
  Primer
gaggattcagccacgaaca

SEQ ID NO: 721 - DNA, 20 bp, Artificial Sequence
  Primer
gcatggaggaaaccattagg

SEQ ID NO: 722 - DNA, 20 bp, Artificial Sequence
  Primer
tggctcttcaaccaaacctt

SEQ ID NO: 723 - DNA, 20 bp, Artificial Sequence
  Primer
tacagtgggaactgcgtttg

SEQ ID NO: 724 - DNA, 19 bp, Artificial Sequence
  Primer
cagggttcgtatgcaggag

SEQ ID NO: 725 - DNA, 20 bp, Artificial Sequence
  Primer
cagtgcagccttggaagtgt

SEQ ID NO: 726 - DNA, 20 bp, Artificial Sequence
  Primer
tcaaaagctgcgtgtgtctc

SEQ ID NO: 727 - DNA, 20 bp, Artificial Sequence
  Primer
cagtgcagccttggaagtgt

SEQ ID NO: 728 - DNA, 20 bp, Artificial Sequence
  Primer
tcaaaagctgcgtgtgtctc

SEQ ID NO: 729 - DNA, 20 bp, Artificial Sequence
  Primer
ccgagatcttctgccttcat

SEQ ID NO: 730 - DNA, 20 bp, Artificial Sequence
  Primer
tccttgccgtctcaaactct

SEQ ID NO: 731 - DNA, 19 bp, Artificial Sequence
  Primer
atctctctagtgccatgac

SEQ ID NO: 732 - DNA, 20 bp, Artificial Sequence
  Primer
agtcttgctaagactttcag

SEQ ID NO: 733 - DNA, 20 bp, Artificial Sequence
  Primer
aaatggcagtttgactgtgg

SEQ ID NO: 734 - DNA, 20 bp, Artificial Sequence
  Primer
ttggctgagttctccctcat

SEQ ID NO: 735 - DNA, 22 bp, Artificial Sequence
  Primer
cataatcttctccggcttcatc

SEQ ID NO: 736 - DNA, 22 bp, Artificial Sequence
  Primer
gtctggtatttccgtgaggttt

SEQ ID NO: 737 - DNA, 19 bp, Artificial Sequence
  Primer
tgattctccaaggcaaggt

SEQ ID NO: 738 - DNA, 19 bp, Artificial Sequence
  Primer
gatttccccattgactgct

SEQ ID NO: 739 - DNA, 19 bp, Artificial Sequence
  Primer
agcacaattccccagacac

SEQ ID NO: 740 - DNA, 22 bp, Artificial Sequence
  Primer
ctgtagcccttactgtttgacc

SEQ ID NO: 741 - DNA, 20 bp, Artificial Sequence
  Primer
ctgtgttctgatgccaatgc

SEQ ID NO: 742 - DNA, 19 bp, Artificial Sequence
  Primer
gcaactttctccaccaaga
